United States Patent Application Publication US 2024/0409597 A1 - sequence listing, part 7

SEQ ID NO: 14461 - RNA, 843 nt, synthetic construct
  misc_feature 1..843: note = source = /note="Description of Artificial Sequence: Synthetic coding sequence"
  source 1..843: mol_type = other RNA
atgaaaacattcacttggaccttgggtgtgctgttctttttgttggtggatactggacattgcagaggcgggcaatttaagataaaaaagattaatcagaggcgctatcctcggaccattaaggatatgataacacggatggatctggaaaatttgaaggatgtcttgagcaggcagaagagggagatcgatgtgcttcagctcgtggtggacgtggatggcaatatcgtaaacgaagtgaaactcctccgaaaagaatcccggaatatgaattcgcgcgtgactcagctctatatgcaattactgcacgaaattataaggaaaagagacaacagtctggaactcagccagctagagaacaaaatattaaacgtcactacagaaatgttgaaaatggctacccgctacagggaactagaggtcaaatacgcatctttaaccgatttggtgaacaatcaatctgtcatgattaccttattggaggaacagtgcctgagaatatttagtcgccaggatacccatgtaagtcccccactcgtacaggtggtaccacaacacatcccaaattcccagcagtatacgcccggactcctggggggaaatgagatacagcgagaccccggctacccccgtgacttgatgcccccccccgacctcgcaacctctcctaccaagagccccttcaagattccaccagtgacctttattaatgaaggaccgttcaaggactgtcagcaggctaaagaagcaggccatagtgtaaatgggatattttgggcagagtatcgaggaggcagctattcactgcgggctgtgcagatgatgatcaagcctatcgactag

SEQ ID NO: 14462 - RNA, 522 nt, synthetic construct
  misc_feature 1..522: note = source = /note="Description of Artificial Sequence: Synthetic coding sequence"
  source 1..522: mol_type = other RNA
atgcactggaaaatgctcctgctgctgttgttgtactacaatgctgaagcatctatgtgtcacaggtggagccgcgccgttcttttccccgccgcacaccgacctaaacgttccagttccctccccctcaatccggtcctacagacgtcactcgaagaggtagagcttctttatgaattcctgcttgccgagcttgagatctctcctgacctgcaaattagcattaaggatgaggagctcgcctccctgcgaaaggcctcagattttagaaccgtttgtaacaatgtgattcctaaaagtatacctgacatccgaaggctttccgcgtcccttagttctcaccccggcattctgaaaaaagaggattttgagcgaacagttttgactctggcgtatacagcataccgcacagccctcagccacgggcatcaaaaggatatatgggcacaatccctggtcagtctctttcaggcccttcgccacgacttaatgcgttcctcgcaaccaggcgttccgccctag

SEQ ID NO: 14463 - RNA, 309 nt, synthetic construct
  misc_feature 1..309: note = source = /note="Description of Artificial Sequence: Synthetic coding sequence"
  source 1..309: mol_type = other RNA
atggagcgaggtgctggcgccaaactgctgccactcctgctactattgcgagccaccggatttacctgcgcccagaccgacggccgtaatggatacacagcagttattgaggtgacctcaggaggcccctggggcgattgggcctggcctgagatgtgtccagacgggttcttcgcttccggattctcactcaaagttgagccaccacagggaatcccgggagacgatactgcactcaatggcataagactccactgtgcccgtggtaatgttcttggaaatactcatgttctgggcagaatggaatag

SEQ ID NO: 14464 - RNA, 351 nt, synthetic construct; identical to SEQ ID NO: 12825
  misc_feature 1..351: note = source = /note="Description of Artificial Sequence: Synthetic coding sequence"
  source 1..351: mol_type = other RNA

SEQ ID NO: 14465 - RNA, 1137 nt, synthetic construct
  misc_feature 1..1137: note = source = /note="Description of Artificial Sequence: Synthetic coding sequence"
  source 1..1137: mol_type = other RNA
taatattcaggcgattacatggaacccgagaagccaggcgctcccctgctcccacccccgccacaaaattctgttccacattacgctgaagcagacatagtgacacttcaaggtgtgaccggaggcaacacttacgcagtccctgctcttcccccaggcgccgtgggggacggaccacctagggttgacttccccagaagccgcttaagatttaaagagaagctgggggaaggacagtttggcgaggtccatctttgcgaggtggatagtcctcaggatctggtgtctttagacttccctctgaacgttagaaagggccacccacttcttgtggctgtgaagattctgagacctgacgctacgaaaaatgccagcttcagcttattctcaaggaacgactttctgaaggaagttaagataatgtctcgattaaaggatcctaatataatcagactcttgggtgtctgtgtgcaggacgaccctttgtgtatgatcactgactatatggagaacggagatttgaaccaattcctgtctgctcatcagctggaagataaggccgcggaaggagcacccggggacggacaagctgctcaggggcctacgatcagctatccaatgcttcttcacgttgccgcgcagattgccagcggaatgagatatctggccaccctaaatttcgtgcaccgagatttagcaacccgaaattgtctggtgggcgaaaattttacaatcaagattgctgactttggcatgtcccgaaatctgtatgccggtgattactatcgtgtgcaagggagggcagtcctgcccatacggtggatggcatgggaatgcatcttaatggggaagttcacaaccgcctctgacgtctgggcttttggagtaacgctttgggaagtgctaatgttatgtagagcgcaaccttttggccagttaacagatgagcaggttattgaaaacgctggggaattttttcgagatcagggacgccaggtgtacctgtctcgccctcccgcctgtccacagggtctgtacgaactgatgttgagatgctggtcaagagaaagcgaacaacgccctcccttctcacagcttcacaggtttcttgctgaggacgccttgaatacggtttag

SEQ ID NO: 14466 - RNA, 942 nt, synthetic construct
  misc_feature 1..942: note = source = /note="Description of Artificial Sequence: Synthetic coding sequence"
  source 1..942: mol_type = other RNA
atgagcgacctactgcttctggggttgatcggcggccttaccctcctcttgttgcttacactcctggcctttgctgggtattccggattgttagcaggcgttgaggtatctgcagggtcccctccaatcagaaacgtaacagtggcttataaattccacatgggtctatatggcgaaaccggcaggctgtttaccgaatcctgctcaataagcccaaaactgcgttccattgccgtttattacgacaacccacacatggtcccgcccgacaaatgccgatgtgctgtaggatccatcttgagtgaaggtgaggagtctcccagcccagaactcatcgacctgtaccagaaattcggattcaaagtctttagcttcccagccccctctcatgtggtgacagccacctttccctatactactatcctttccatctggctcgccacgcgacgcgtacacccagccctagacacgtacataaaggaacggaagctctgtgcttaccctcgactggagatctatcaagaagatcagatacacttcatgtgtccactagccaggcaaggagatttctacgtccccgaaatgaaagagaccgaatggaagtggagagggcttgtggaagctatcgatacgcaagtggacggaaccggcgccgataccatgtctgacacaagcagcgtgtctctggaggtgtcaccaggcagtcgcgaaacatccgcagccaccctcagtccaggggccagcagcagggggtgggacgacggtgacacacgctctgaacacagctacagcgaaagcggggcatcaggatcatcgtttgaagaattagatctagagggggagggaccattgggagagagcagactagacccgggcactgaacctttaggtaccaccaaatggttatgggagccaacagcaccagaaaaagggaaggagtag

SEQ ID NO: 14467 - RNA, 420 nt, synthetic construct
  misc_feature 1..420: note = source = /note="Description of Artificial Sequence: Synthetic coding sequence"
  source 1..420: mol_type = other RNA
atgggacctgaggctctttcttctcttctcctcctgctactggtggcctcaggcgatgctgatatgaaaggccacttcgaccccgctaagtgcaggtacgccctgggtatgcaggacagaacaattcccgactccgacattagcgcaagctcttcctggtctgattccacagcagcccgccactcacgtcttgagagcagtgatggcgatggggcttggtgccctgccggatccgtgttccctaaagaggaagaatatctccaagtggatcttcagagactgcatctggtcgctcttgtgggaacccagggtagacacgcaggcgggttaggaaaggaattcagtcgcagctacagactaagatattctcgggacgggagaagatggatgggctggaaggaccggtggggccaggaatag

SEQ ID NO: 14468 - RNA, 342 nt, synthetic construct
  misc_feature 1..342: note = source = /note="Description of Artificial Sequence: Synthetic coding sequence"
  source 1..342: mol_type = other RNA
atggataatgtccaacctaaaattaaacatcgccccttctgtttcagtgtgaaaggtcacgtgaagatgctgcgactcgccttaaccgtaactagcatgacattttttatcattgcacaagcccccgagccatacattgtaatcactgggttcgaagttacagtgatcctcttctttatcctgctgtacgttctcagactggacagactcatgaagtggctgttctggcctctactcgacattattaacagtcttgtgaccaccgtattcatgctaatagttagcgtgctagccttaatcccagaaacaacaactcttacagtcggcggcggactattttag

SEQ ID NO: 14469 - RNA, 465 nt, synthetic construct
  misc_feature 1..465: note = source = /note="Description of Artificial Sequence: Synthetic coding sequence"
  source 1..465: mol_type = other RNA
atgttcggttggggagattttcacagcaatatcaagactgtcaaactcaatttactgatcacaggaaagatagttgaccatggcaatggcactttcagtgtctattttcggcacaattcaactgggcaaggcaatgtctccgtatccttggtcccaccaactaaaatcgtcgaattcgatctcgcacagcagacagttatcgatgcaaaagattccaagagtttcaattgccgaatagaatacgagaaggtcgacaaggcaaccaagaacactctttgcaattacgatccctcaaaaacttgttaccaggaacagacacagtcacacgtgtcatggctctgctcgaagccctttaaagtcatatgcatttacatctctttctattccaccgactacaaactggtccagaaggtctgccccgattataactaccattctgacaccccctactttccctcaggttag

SEQ ID NO: 14470 - RNA, 531 nt, synthetic construct
  misc_feature 1..531: note = source = /note="Description of Artificial Sequence: Synthetic coding sequence"
  source 1..531: mol_type = other RNA
atggcagatatgcagaacctggtagagagactggagcgagccgttgggcggcttgaggcagtgtcgcacacgtcagacatgcacagaggttacgcggattcacccagcaaagccggcgctgccccctatgttcaggcattcgatagtctgctagccggccctgttgccgaatatctgaaaatcagcaaggaaattggcggggatgtccagaaacatgcagaaatggtgcacaccgggctgaagctggaaagagcccttcttgtgaccgcctctcaatgccagcagccagcggagaacaagctgtccgacctactggcccccattagcgaacagatcaaagaggttataacattcagagaaaaaaaccgcggatctaaactttttaatcacttatccgccgtcagtgagtcaatccaggctttagggtgggttgctatggcaccgaagcctgggccctacgtaaaggaaatgaatgacgcagccatgttctatactaaccgtgtgcttaaggaatacaaggatgtggattag

SEQ ID NO: 14471 - RNA, 2535 nt, synthetic construct
  misc_feature 1..2535: note = source = /note="Description of Artificial Sequence: Synthetic coding sequence"
  source 1..2535: mol_type = other RNA
atgggccccggcgcaccattcgctcgagtgggctggcctcttcccctccttgtggtcatggcagctggggtcgctcccgtatgggcatctcactctccgcaccttcctaggcctcactctagagtgccaccccacccctcgtctgaacgcagggctgtatacataggcgccctcttccctatgagtggaggatggcccggcggacaagcttgccaaccagcggttgagatggctctcgaagacgtgaattcacggcgtgacattctacctgattacgaactcaagctcatccaccacgacagcaaatgtgacccagggcaggctacgaaatatttatacgagttattatacaacgaccctatcaagataattttgatgcctggctgttcctctgtgtccacgttagtggccgaagcagctagaatgtggaaccttatcgtgctttcctacggctcctcatcaccggcccttagtaaccgccagagatttcctacttttttcagaacgcacccatcagctaccctacataatcccacgcgggtgaagttatttgaaaaatggggatggaaaaagatcgccacaatacaacagaccaccgaggtttttacttccacgttagacgatcttgaagagagagtcaaggaagccggcattgagattacattcaggcaaagcttttttagcgaccccgcagttcccgttaagaatctaaagagacaggacgccagaatcatagtgggtctgttctacgaaaccgaggcacgtaaggtgttttgcgaagtgtacaaggagcggttgttcggaaaaaaatatgtgtggtttctgataggatggtacgcagataactggtttaagatttatgacccctccatcaactgcacagtcgatgaaatgaccgaggcagtcgagggacacatcaccacggaaattgtgatgttgaaccctgcaaatacccggtctatcagcaacatgacttcacaggaattcgttgagaagctgactaagcgattaaagagacacccagaagaaacaggtgggttccaggaggctccactggcatatgatgcgatttgggccctcgcattagccctgaacaaaacttctggaggcggaggcagaagcggggtgcgcctggaggactttaactacaacaatcaaacaatcacagatcagatctatcgcgccatgaattctagctcatttgaaggcgtctctgggcatgttgtgtttgatgcctctggtagcaggatggcttggaccttaatagaacaactgcagggtggtagctacaagaagattggctactatgattcaacaaaagatgatctatcctggagtaagacggataaatggattggaggctctccacctgccgatcaaacactagttattaaaacattccgatttctgagccaaaagctcttcatctccgtttcagtgctcagctccttaggcatcgtgttagcggtggtttgcctgagttttaatatctacaattcacatgtgagatacattcaaaattctcaacccaatcttaataacctgactgctgttggttgctctctcgcattagccgctgtgtttccactcgggctagatggataccatataggtaggaaccagttcccgttcgtgtgtcaggctcgcttatggctacttggactcggattctccttggggtatggatccatgttcacaaagatctggtgggttcatactgtgtttaccaaaaaagaagaaaagaaagaatggcgaaagacactggagccctggaagctgtatgccaccgtgggcctcctagtagggatggatgtcctcactcttgcaatctggcaaatagtggaccccctgcaccggaccattgagacctttgcaaaagaagaaccaaaagaagatattgacgtgtccattctgccccaattggaacactgtagcagcagaaagatgaacacctggctgggaatattttatggatataaggggttgctgctgttactgggaatatttttagcatacgagaccaagagcgtcagtacagaaaagattaacgaccatagggctgtgggaatggcaatctataacgtggccgtcttatgcctgataacagctcccgtgaccatgattctctcctcacagcaggacgcagcctttgccttcgcttccctggccattgtcttttcctcatacatcacacttgtcgtgttgttcgtccccaagatgcggaggcttattacccgtggcgaatggcagagtgaggcccaggataccatgaagacaggatctagtactaacaacaacgaagaagaaaaaagcagacttttggaaaaagagaaccgcgaattggagaaaatcattgcagagaaagaggaacgcgtatccgagcttcgccatcagttgcagagccgccagcagctgcgttctcgcaggcaccctcccacccctcccgaaccatccggcggactccccaggggccctccagaacctccagataggctctcttgcgacggatctagagtacacctcctgtataagtag

SEQ ID NO: 14472 - RNA, 2055 nt, synthetic construct
  misc_feature 1..2055: note = source = /note="Description of Artificial Sequence: Synthetic coding sequence"
  source 1..2055: mol_type = other RNA
taaccaagaagctcaacccatgtgccactggtcctgccattattggtcctgttgctgcttgccccagctcgccaagccgcagcacaacgctgcccacaagcgtgtatttgtgataactctaggcggcacgtagcttgtagatatcaaaacctgactgaagtacctgatgcaattccagagttaacccagcgcttagatttgcaaggcaatctgcttaaggtcatcccggccgctgcttttcaaggcgtcccccacctgacacacctagatctccgccactgcgaggtggaactggtggcagagggcgctttcaggggccttggaagactgttactgttgaacctggcctctaatcacctaagggagttgccacaggaggccttagatggactgggatccttgaggagactggaactagagggaaatgctttggaggagcttagaccgggtactttcggcgcgctcggggccctagctaccctgaacctcgcacacaacgcgttggtgtatctgcctgcgatggcgttccaaggactgctgagggtgagatggctgagactgtcccataatgcactcagcgtgctggcacccgaagccttagcaggtctccccgcactgcgccggctctcactgcatcacaacgaattacaggcactcccaggtcctgtgctgagtcaggcacggggactcgctaggttagaactgggccataatccccttacttacgccggggaggaagacggactggcactacctggtcttagagaactactgctggatgggggcgcactgcaggctctgggccctcgcgcattcgcccactgcccccgccttcacacactggaccttagggggaatcaactggatacactgccgccacttcagggccctggacaactgcggcgcctgagattacaaggaaatcccctctggtgcgggtgtcaggcacgccctctcctagagtggttggcaagagcgagagtccggtccgacggcgcctgtcagggccctagacgcctccgtggagaagctctggatgcacttagaccatgggacctaagatgtccaggggacgcagcccaagaagaagaagagcttgaagagagggccgttgccggcccacgagccccacctagaggcccacccaggggacccggcgaggaaagagccgtggctccctgccccagggcctgtgtttgcgttcctgaaagcagacatagcagctgtgaaggttgtggattacaggcagtgccccggggattcccatcggatacacagctcctggaccttcggcgaaatcatttcccatcagtccctcgcgcagcattccctggcctgggtcatttggtgtccctccatcttcagcactgtggcatcgctgagctcgaagccggcgccttggccggactgggtcgcctgatttacctctacctttccgacaatcaactggctggcttgtctgccgccgcactcgaaggagctccaagactcgggtacttatacctggaacgaaatagatttctgcaagtgcctggagcggcccttagagcgttaccctctctgtttagtttacatttacaagataatgccgtggatcgtcttgctccgggggatctgggacgcactcgggctctaagatgggtgtacttatccgggaacaggataaccgaagtttctctaggggcattgggccccgccagagaactggagaagctacatcttgacagaaatcagctgcgagaagtgccaactggcgcccttgagggcttgcctgccttattggaattgcaactgagtggaaacccactgcgcgcattgagagacggcgcattccaacctgtaggacggtctttacagcacctgtttctcaactccagcggactcgagcagatttgtcctggcgcattttccggactgggacccgggctgcagagcttgcacttgcagaagaaccagttacgcgccttacctgcccttccatcagcccgccggacccccatcaaaggaagacagtgcggagccgacaaggtcggtaaagaaaagggacgcctctag

SEQ ID NO: 14473 - RNA, 2259 nt, synthetic construct
  misc_feature 1..2259: note = source = /note="Description of Artificial Sequence: Synthetic coding sequence"
  source 1..2259: mol_type = other RNA
atggcccgtcacttgctgctcccgctggttatgctggttatctcgccgattcccggggcttttcaggactccgctttgtctccaactcaagaagaaccagaggacttggattgcggcaggcctgagccttctgctagaatagtcggcgggtcaaatgcccaacccggaacctggccctggcaggttagtttacatcacgggggtggccatatttgtggtgggtccctaattgccccttcgtgggttctatccgcagcccattgttttatgaccaatggcaccctggaaccagccgctgagtggtctgtattactgggcgtccactctcaggatggccctctggacggggcacatacaagggctgttgcggctatcgttgtacccgccaactatagccaggtcgaattaggcgccgatttggctctgcttagactggcctccccggcatctctcggacccgctgtctggcctgtgtgccttccacgcgcctctcaccgctttgttcacggaaccgcttgttgggcaactggatggggcgatgtgcaggaagcagatcccttaccacttccttgggttcttcaagaggtcgagctgcgactgttgggagaagctacatgtcagtgcctctacagccagcccggtcctttcaatcttacacttcaaatcctacctggaatgttatgcgctggatatcccgagggacggcgagacacttgtcagggtgattcaggcggaccccttgtttgcgaggaaggggggcggtggtttcaagccggcataacatcctttggatttggctgcggacggaggaaccggccaggtgtgtttactgctgtcgctacctatgaagcctggattagggaacaggtcatgggctccgagccaggtcctgctttccctacccagccccagaaaacccagtcagatccacaggaacctagggaagagaactgtacgatcgccctgcccgagtgtggcaaagcaccccggccaggggcctggccttgggaggcccaggtgatggttccaggcagccgaccatgccatggcgcactcgtctccgaaagctgggtcctggcccccgcatcatgctttttagaccccaatagctccgacagcccaccccgggatttagacgcttggcgtgtcctgctcccctcccgacctcgcgctgagagagtcgctagactcgtgcaacatgagaacgcttcatgggataacgcaagcgatctggccctgttgcaactccggacgcccgtaaatctgagcgccgctagccggcccgtgtgtcttccacaccccgaacattattttttgcccggatccagatgtagactcgcccgatggggtcggggggagccagccttgggacctggagccctcttggaagccgaactgttggggggttggtggtgtcactgtctatatgggaggcaaggtgccgccgtacctctgcctggcgaccctcctcacgcactttgtcccgcctaccaagagaaggaggaagtcggatcctgctggaacgactcacgctggtcgttgctgtgccaagaggaagggacatggtttctcgccggcattcgagattttccatccggttgtcttaggccaagggcattttttccccttcagacccatggaccatggattagtcatgtcactagaggcgcatacttggaagaccagttagcatgggactgggggccagacggagaagagaccgagacccagacctgccccccccacaccgaacatggggcttgcggcctacggcttgaagcagcccctgttggagtcctctggccttggttagccgaggtgcacgttgctggggaccgtgtgtgcactggaattttgttggccccaggctgggtactggccgccacccattgcgtcttgagaccaggaagtacaacagtgccttacattgaggtttatctaggaagagccggcgctagcagtttgcctcaagggcaccagatgacaagtgcaccccctctcttgtgccagatgaccgaaggatcttggattcttgtcggtatggcagtccaaggaagccgagagctgtttgccgccattggtcccgaggaggcatggatctcccaaactgttggcgaagctaactttctgcccccctcgggatcaccccactggcccactggcggttcaaacctttgcccaccggaattagccaaggcatccggcagcccccatgcagtctatttcttgctgctactgactcttcttattcaaagctag

SEQ ID NO: 14474 - RNA, 453 nt, synthetic construct
  misc_feature 1..453: note = source = /note="Description of Artificial Sequence: Synthetic coding sequence"
  source 1..453: mol_type = other RNA
atgcgattcatggcaggccccgccggtagccagagtcttggcccactttgcttccattcaagccctcaagctttatacactgtactcctcatcgtgcttgttatgatgtccctagtgttcgggaagtttgtgcccgttaactgggaacctccacagcctttgcccttccctaaatatttacgatgctacagatgcctgctcgaaactaaggaactgggatgcttactggggagcgacatatgtctgacgcccgcaggtagctcctgtataactctgcacaaaaaaaatagctcaggcagtgacgtgatggtctccgattgtagaagtaaggagcagatgtcagattgtagcaacacccgcacctctcccgttagcggcttttggatcttttcccagtactgttttctggatttctgtaatgaccctcagaaccgcggcctttacaccccttag

SEQ ID NO: 14475 - RNA, 1161 nt, synthetic construct
  misc_feature 1..1161: note = source = /note="Description of Artificial Sequence: Synthetic coding sequence"
  source 1..1161: mol_type = other RNA
atgaagtttcaaggaccactggcatgcttactgttagctctgtgtctgggctcaggtgaagctggacctctacagagcggcgaggagagtacaggaactaatattggggaagccttgggacacggtctgggcgacgccctttccgagggggtggggaaagccatcgggaaggaagcagggggggccgctggcagcaaagtgtctgaagcccttgggcaaggaaccagagaagctgtgggcaccggagtgagacaggtgcccggatttggcgtggccgatgcactgggaaatcgggtgggcgaagccgcacatgctttagggaacaccggccacgagattggtcggcaagccgaagacgtcataagacatggggctgacgcggtgagaggttcctggcagggggtccctggacacaacggggcttgggaaacttcaggaggacacggcatttttggctcccagggaggattaggtggtcagggacaagggaacccaggcgggctcggaacaccgtgggtgcacggatacccaggtaattcagccgggtcttttggaatgaaccctcagggggcgccatggggccaggggggaaatggcgggccccccaacttcgggacgaacacccaaggagcggtagcacagcccggctatgggagtgtgcgtgcatctaatcagaacgaaggatgtacaaatcccccaccatctgggtctgggggcggttctagcaattcaggcggcggcagtgggagtcaaagtggctcatcaggatcagggtccaatggcgataacaacaatggtagttcatcaggcgggtcatcctctggctctagtagcggcgggagcagcgggggatcatctggtggcagcagtggcaactcgggaggatccaggggagactccggatccgaaagttcctggggctcctctactggctcatccagcggaaatcacggaggaagcggcggcggcaatggacacaagcctggctgtgagaaacctggcaatgaagcacgcggaagtggcgagtctggcatacaaaactctgaaacatctccagggatgtttaactttgataccttttggaagaattttaagtctaaactggggttcattaactgggatgcaatcaataaggaccagcgtagttcccgaatcccgtag

SEQ ID NO: 14476 - RNA, 1995 nt, synthetic construct
  misc_feature 1..1995: note = source = /note="Description of Artificial Sequence: Synthetic coding sequence"
  source 1..1995: mol_type = other RNA
atgaagacaggactgttcttcctttgcctgctaggcaccgctgcagctatcccaaccaacgcgagactcttatccgatcactctaaacctaccgccgaaactgtggcccccgacaacacagccatcccaagtctgcgcgccgaagccgaagagaatgaaaaagaaaccgccgtgagcacagaggatgactcccaccacaaagctgaaaaatccagtgtcctgaagtctaaagaagagtcacacgaacaaagcgctgagcagggcaagtcctccagtcaggaactggggctcaaggatcaagaggattccgatggtcacctgtccgtgaatctggaatatgccccaacagagggaacactcgatatcaaggaagacatgtccgagccccaggaaaaaaaacttagcgaaaatactgactttctcgcccccggcgtcagttcctttacggactcgaaccagcaagaatctataacaaagagagaggaaaatcaagagcagcctagaaattattcccaccatcagttaaatagatcatctaaacatagccaggggttgagagaccaggggaaccaggagcaggaccccaatatcagcaacggagaggaggaagaagaaaaggagccgggagaggtaggaacacacaacgataaccaggaaagaaagacggaactgcccagagaacacgcaaacagtaagcaggaagaggataatacgcagagtgacgacatattggaggaaagcgatcaacccacacaggtgagtaaaatgcaggaggatgagtttgatcagggtaatcaagagcaggaggataattctaacgcggagatggaggaggaaaacgcttctaatgtcaataaacacatccaggaaacagagtggcaaagccaggaaggaaagacaggtctggaggcaatatcaaaccacaaagaaacagaagagaaaaccgtttctgaagcactgttaatggagccgaccgacgacgggaatacaaccccccggaaccatggggtggatgacgatggggatgacgacggcgatgacgggggtacagatggcccaaggcatagcgctagcgatgattactttattccttctcaggcttttctagaagctgaacgcgcacagagtatcgcatatcatcttaagatcgaggaacaacgggagaaagtacatgaaaacgaaaatatcgggaccacggaaccaggtgaacatcaagaagctaagaaagctgagaatagtagcaacgaggaagagacatcttcagagggaaatatgcgagtccatgcggtggacagttgcatgagcttccagtgtaaacgcggccacatttgtaaagccgaccagcaggggaagccgcactgcgtttgccaggacccagttacatgccccccaacaaagcccctggaccaagtatgcggcacagacaatcaaacttatgcaagtagctgccatctattcgccacaaagtgcaggctggaagggactaagaaaggccatcagttacagctggattacttcggagcctgtaaatcgataccaacatgtactgattttgaagttattcaattccccctgagaatgcgagactggctcaagaatatcctgatgcagttgtacgaagctaatagcgagcacgccggctatcttaacgaaaaacagcgcaacaaagtgaagaaaatttatcttgatgagaaacgtttgttggcaggcgaccaccccatcgatcttctgctgcgagatttcaaaaagaattatcacatgtacgtataccccgtgcattggcaattttccgagcttgatcagcaccccatggatagggtgctcacccactctgaacttgccccactccgcgcctctttagttccgatggaacattgcatcacccgtttttttgaagaatgcgatccaaacaaagataaacacattaccctcaaggaatggggccattgtttcggcatcaaggaggaagacattgatgaaaacctgcttttctag

SEQ ID NO: 14477 - RNA, 420 nt, synthetic construct
  misc_feature 1..420: note = source = /note="Description of Artificial Sequence: Synthetic coding sequence"
  source 1..420: mol_type = other RNA
atgggtcccgaggcactaagctcactcttactcctattactagttgcttctggcgacgctgatatgaaaggccactttgaccccgcgaaatgcagatatgcgcttggcatgcaagataggacaattcctgattccgatatctccgccagctctagttggagtgactccactgctgccaggcattcaaggctggagagtagcgatggcgacggcgcctggtgccctgcgggaagcgtgttccctaaggaggaagagtacttgcaagttgatctgcagaggctgcaccttgtggctcttgtgggcacacagggtagacatgcgggagggctgggcaaagagttttctaggtcctataggcttcggtatagcagagatggccggcggtggatgggctggaaggatagatgggggcaggagtag

SEQ ID NO: 14478 - RNA, 285 nt, synthetic construct; identical to SEQ ID NO: 12839
  misc_feature 1..285: note = source = /note="Description of Artificial Sequence: Synthetic coding sequence"
  source 1..285: mol_type = other RNA

SEQ ID NO: 14479 - RNA, 699 nt, synthetic construct
  misc_feature 1..699: note = source = /note="Description of Artificial Sequence: Synthetic coding sequence"
  source 1..699: mol_type = other RNA
atgttgccgaaaagtcgcagagcattgacaattcaggagatcgcagcactcgcccgttcctctctgcacggtatttctcaagtggtcaaggaccacgtgactaaaccaaccgccatggcccaagggagagtggcccatcttatagagtggaaaggatggagcaagcccagtgatagcccagcagcacttgagagcgctttttcaagctattccgatctatctgagggtgagcaggaagctaggtttgccgcgggcgtggccgaacaattcgcaatcgctgaagccaagctgagggcttggtcctccgtggatggggaagattccactgatgactcttacgacgaagacttcgctggcggaatggataccgacatggccggacagctacccctgggaccacacctgcaggacctgttcaccgggcatcgattttcacggcctgtacggcagggcagtgtcgaaccagaaagcgactgctcacaaactgtttctcccgacactttatgttcttccctttgttctctggaggatggtcttctgggcagcccggcccgcttggcttctcaactgctcggagatgaactgctgctcgccaagctgcctccctctcgagaaagcgcttttcgctcccttggtcccttagaggcccaagactctctttacaatagtccgctcaccgagtcctgtctctccccatag

SEQ ID NO: 14480 - RNA, 2631 nt, synthetic construct
  misc_feature 1..2631: note = source = /note="Description of Artificial Sequence: Synthetic coding sequence"
  source 1..2631: mol_type = other RNA
atgggacccgaggcactgtcttccttactgctcttattgcttgtagcctcaggcgatgcggacatgaaaggacactttgacccggccaagtgccggtatgcgctaggaatgcaagatcggaccatccccgattcagacatctcagcaagctcttcatggtcagatagtactgcagctaggcactctcgtttggagagctctgacggagacggcgcatggtgcccggcaggaagcgtgttccctaaggaggaggaatatttacaagtggacttacaaaggctgcatctggtcgccctggttggaactcagggtagacacgcagggggcttaggaaaagagttttctcggtcatatagactgcgctatagcagagacggcagaaggtggatgggctggaaagaccgctgggggcaggaagtgattagcggtaatgaggatcccgagggtgtggtgctgaaggacctgggacctcccatggtggcaaggctggttcggttttatccaagggctgatagagtaatgagcgtctgtcttcgtgtagagttgtatggatgtctttggcgcgacggactgttaagctataccgcaccagtgggtcagacaatgtatctttccgaggcggtatacctcaacgattcaacctacgacggccataccgtgggaggcttacaatacggcggactggggcagctggccgatggggtggtgggattggacgactttagaaaaagccaagaactccgagtctggcctggctacgattatgttggttggagcaatcattctttctcaagtgggtatgttgagatggaattcgagttcgacagattaagggccttccaggctatgcaggtgcactgtaataatatgcatactctgggcgcccgcctgcctggcggagttgagtgcaggtttagacgaggcccagcaatggcttgggaaggcgagcccatgagacacaatttaggggggaacttaggggatcccagggcccgggccgtgtcagtcccactaggcgggcgtgtggccagattcctgcagtgtaggtttctatttgccggaccatggcttctcttttccgaaatctcttttattagtgacgtagtgaacaatagttctccggccctcggtggcactttcccacctgccccgtggtggcctcccggcccaccaccaacgaacttttcctcattggaactggagccccggggacagcagcctgtggccaaggctgagggcagtcctaccgctatcctcatcgggtgtcttgttgccatcatattgcttttgttgctgatcatcgcacttatgctgtggagattgcactggcgaagacttctgtctaaggccgaaagacgtgttctggaagaagagctgactgtacacctgtccgtacccggcgacaccatactgatcaacaaccgtcctggacctagagaaccacccccctaccaggaaccaagacctagagggaatccaccacacagcgcgccttgtgtccccaatggttccgcctatagcggcgattatatggagccagagaagccaggcgcccctctgctgcccccgcccccacagaactccgtccctcactacgctgaggcagacattgtgacactgcagggagtgaccgggggaaacacatacgccgtgccagcactcccccccggtgcggttggcgacggaccccctcgcgtcgattttccacgctctaggctgagatttaaagagaagctgggcgaaggccaattcggtgaagtgcacctctgtgaagttgattcgcctcaggatttggtcagtctggacttccccctaaacgtgcgtaaaggtcaccctcttttagtcgccgtgaaaattctgaggcccgacgcaacgaaaaatgctaggaatgattttctaaaagaggtgaagatcatgtctcgccttaaagatccgaatattatcagactgctgggggtctgcgttcaagatgatccgttgtgtatgattactgactatatggaaaatggggatttaaaccaatttctgtctgcccaccagctggaggacaaagctgcagagggcgctccgggagatggtcaagcagcccagggaccgactataagttacccaatgctcctccatgttgccgcacaaattgcttcggggatgaggtatctggctacactaaatttcgtccatcgtgatcttgccacacgcaattgcctagtcggagaaaatttcactattaaaatcgctgatttcggcatgtctaggaatctgtatgccggggactactatcgagtgcaaggccgagcggtcctgccaatccgttggatggcgtgggagtgcattctcatggggaagttcactaccgcaagcgatgtgtgggctttcggcgtcaccctttgggaagtgctcatgttgtgtcgcgctcaaccatttggccagttgactgatgagcaagtgatcgaaaacgccggagagttttttcgcgatcagggtcggcaagtgtacctcagtcggcctccggcctgccctcagggtctctacgaactgatgctcagatgttggtcccgtgagtcagagcagagacctccgttctcccagctgcacagatttctcgcagaggatgcattaaacaccgtgtag

SEQ ID NO: 14481 - RNA, 165 nt, synthetic construct; identical to SEQ ID NO: 12842
  misc_feature 1..165: note = source = /note="Description of Artificial Sequence: Synthetic coding sequence"
  source 1..165: mol_type = other RNA

SEQ ID NO: 14482 - RNA, 2256 nt, synthetic construct
  misc_feature 1..2256: note = source = /note="Description of Artificial Sequence: Synthetic coding sequence"
  source 1..2256: mol_type = other RNA
atggccttcagaaccatctgcgtcctcgtgggtgtattcatttgcagcatctgcgtgaaaggaagttctcagccccaagccagagtctacctcacattcgatgaattgagagaaactaaaacttcggaatatttctccctgtcccatcatccgctggattacaggatattgctcatggacgaagaccaggacagaatatacgttggaagcaaggatcatattctgagtttaaacattaataatattagtcaagaagccttgtcagttttttggcccgcatccaccatcaaggtagaggaatgtaagatggcagggaaagatccaactcatggttgtggtaattttgtaagagtaattcaaacatttaacagaactcacctatacgtctgcggttccggtgcattcagcccagtttgcacgtatctgaacagagggcggcgcagcgaggatcaagtttttatgatcgactctaagtgtgagtccggaaaaggaaggtgttcatttaaccccaacgttaacaccgtgagtgtaatgatcaacgaggaactctttagcggcatgtacattgactttatgggtactgatgcagctatatttcggagtttaactaaacgcaacgccgtgagaaccgatcaacataacagcaaatggttatccgaaccgatgttcgtcgatgcccatgttatcccagatggcaccgacccgaatgatgcaaaggtatactttttttttaaggagaagttaacagacaacaaccggtccaccaaacagatccacagtatgatagcccgaatctgcccaaatgatacagggggcctgcgctctttggtgaacaaatggacaacattcctgaaggcccggctcgtctgcagcgtaacggacgaagacggacctgaaacgcattttgatgaactcgaagacgtgttcctgttagaaaccgacaatcccagaactactctcgtttatggcatattcaccacatcgtcttctgtctttaagggatcagccgtctgtgtttaccaccttagcgatatccagacagtctttaacgggccttttgcccataaagaaggtcctaaccatcaacttatttcttatcaggggcgcattccatacccacgtcctgggacttgtccaggcggagcgtttactcccaatatgaggacaacaaaagagttccccgacgatgttgtaacattcatcaggaatcaccctctcatgtacaattcaatatatccaatacacaaaaggccactgatcgttagaattggaactgattacaagtacactaagattgctgtcgaccgagtgaatgctgccgatggcagataccacgtcctcttcctcggtacagatcgaggaaccgtgcaaaaagttgtcgtgttgccaaccaataatagcgtttccggcgaattaatactggaagagctcgaggtattcaaaaaccatgccccaatcaccacaatgaagataagctcgaagaagcagcagctatacgtcagtagcaatgaaggagtgtcccaggtgagtctgcaccggtgccatatttacggaaccgcctgcgccgattgttgtttggctagagacccttactgtgcctgggacggtcacagctgcagtagattttacccaactggtaagcggagatccaggcgccaggacgtgcggcatggcaaccccctcacccagtgtcgtggctttaatttgaaggcttacagaaatgcagcagaaatcgttcagtatggcgtgaagaacaatacaacctttctcgagtgcgcacccaaatcacctcaggcaagcattaaatggctgcttcagaaagataaggatcggcgtaaggaggttaaattaaacgagaggattatcgccacatcccaggggttacttatacgttctgtacaagggagcgatcaaggactttaccattgtatcgccacggagaacagcttcaagcaaacaatcgcgaaaattaacttcaaagtcctagactcggagatggtggccgtcgtaacagacaagtggtccccctggacatgggcttcctctgttcgtgctctgccgtttcatccaaaagatataatgggcgccttttctcactcagagatgcagatgatcaaccagtattgtaaagatactagacaacagcaccaacagggggatgaaagtcaaaagatgagaggagattacggaaagctgaaagcactgataaatagccggaaaagtcgaaacaggaggaaccagctgccggagagctag

SEQ ID NO: 14483 - RNA, 630 nt, synthetic construct
  misc_feature 1..630: note = source = /note="Description of Artificial Sequence: Synthetic coding sequence"
  source 1..630: mol_type = other RNA
atgggacctgaagccctgtctagcctgttgcttttactgctcgtggccagtggagacgccgacatgaaggggcactttgatcctgccaaatgcagatatgcactcgggatgcaggacaggaccattcctgacagcgacatctccgcctcctcttcctggagcgattcaacagcagctaggcactcaaggctcgaaagttctgatggggacggtgcctggtgccccgccggatcagtctttccaaaggaagaagagtatctgcaagttgatcttcagaggctccacctcgtagccctcgtgggtacacagggtagacatgccggaggcctcggcaaagaattttcccgaagctacaggcttcggtactcaagggatggacgccgatggatgggttggaaagatagatggggtcaggaagtgatttccgggaatgaagatccagaaggtgttgtgttgaaggacttaggaccacccatggtcgcccgactcgtgcgcttttacccaagagctgatagggtcatgagtgtttgcctgcgtgtggagctctatgggtgcttatggcgagatggtttattgagttacaccgccccagtaggacagacaatgtacttatccgaagctgtttactag

SEQ ID NO: 14484 - RNA, 315 nt, synthetic construct
  misc_feature 1..315: note = source = /note="Description of Artificial Sequence: Synthetic coding sequence"
  source 1..315: mol_type = other RNA
atgtctgatctactcttgctgggactgattggaggtctcacacttttgctgcttcttacactcctggccttcgccggctactcaggtctcctggctggagttgaggtgtccgcaggttcccctcccatccgcaatgtgacagtggcttacaaatttcacatgggcctatatggcgaaaccggccggctcttcacggaaagttgttcaatctcacccaaactccgcagtattgccgtatactatgataacccgcacatggtgcctccggataagtgtcggtgcgccgtcgggtcaatcctcagcgaaggagagtag

SEQ ID NO: 14485 - RNA, 2631 nt, synthetic construct
  misc_feature 1..2631: note = source = /note="Description of Artificial Sequence: Synthetic coding sequence"
  source 1..2631: mol_type = other RNA
atgggcccggaggccttaagctctctgcttctccttttactcgttgcgtctggggatgctgacatgaaaggccattttgaccccgctaaatgcagatatgctctgggcatgcaggaccggaccattcccgactctgacataagcgcttcaagttcttggtctgattccaccgctgctcggcattccagactggagagctcggacggagatggcgcctggtgcccggctggtagcgtgtttccaaaggaagaagagtaccttcaggtcgaccttcagcgactgcacttagtggcactcgtagggactcaggggagacacgccggggggttgggcaaagagttcagtcgcagttacaggctgagatattctcgcgacggtagaagatggatgggatggaaggacagatggggccaggaggtcatttcaggaaacgaagacccagagggagtggtgcttaaggatttgggcccaccaatggtggctagattggtgagattctacccaagggcagaccgcgtgatgagtgtgtgcctcagagtggaactctacggttgcctttggagggacgggctgttaagctacacagccccggtgggacagaccatgtacctatcagaagccgtgtacctcaacgactccacatatgatgggcacaccgttggaggtctgcaatatggaggtttgggacagttggctgacggagtcgtaggactggatgacttcagaaagtctcaggagttacgtgtttggccaggctacgactacgttgggtggagcaaccactcattctctagtggatatgtcgaaatggagtttgagttcgaccgactcagggcgtttcaggctatgcaggttcattgtaacaatatgcacacgctaggcgcccgcctacctggaggggttgagtgccggttccgacgagggcccgctatggcttgggagggggaacctatgaggcacaatttgggtggcaacctcggcgatcccagagcgagggcagttagcgtgcctctaggaggcagagtggctaggttcctacagtgtcgtttcctgtttgctggtccatggttgcttttttccgaaatctcttttatttccgacgtcgtaaacaattcttcaccagctctaggagggacttttcctccagccccttggtggcccccaggcccgccccctaccaacttcagttcactcgagctggagccacgcggtcagcagcccgtggctaaggctgaaggttcacccactgccattcttatcggatgcctcgtcgccatcattctgctgctgttattgattatcgccttaatgctctggaggctccattggcgccgattattatccaaggctgaacgccgggttctggaagaggaattaactgtccacctatccgttcctggcgacacgattctaataaataatcgacccggtccccgagaaccacccccttatcaggagccacgtccgcgcggcaaccccccgcactccgctccctgtgttccaaacggtagcgcgtacagcggagactacatggaaccggagaagcccggcgcacctttgctcccgccccccccccaaaattctgtaccccactatgctgaagccgacattgtaacactgcaaggggtgactggcggtaacacgtacgccgtcccggcgctaccgcctggcgcagtgggagacggtccccctcgcgtggactttccccgctcccggcttcgctttaaggaaaaacttggtgaaggccagttcggagaagttcatttatgtgaagtcgattcgccacaagacctggtatcgctcgactttccactcaatgtgaggaaaggccaccccctcctcgtcgcagtgaagattcttcgacccgatgctactaaaaatgcacggaacgattttcttaaagaagtcaagatcatgtcgagattgaaggatcctaacattatccgcctgctgggagtgtgtgtccaggatgatcctctgtgtatgattactgactatatggaaaacggtgacttgaaccagtttttgtctgcccaccaactggaagataaggctgccgagggagctccaggcgatggacaggccgctcaggggccaacaattagttaccccatgcttcttcacgtggcggcccaaatcgctagtggaatgagatacttagccaccctcaatttcgtccatagggacctggctactcgcaactgcctcgtgggagagaatttcacaattaagatcgctgatttcggaatgagtcggaacctgtatgcgggagattactatagggtgcaaggcagagcagtgctgccgattaggtggatggcatgggagtgtatcttgatgggcaagtttacaacagcgtctgatgtctgggccttcggcgtgacactctgggaggtactgatgctttgccgcgcccagcctttcggtcaactgacggacgagcaggtcattgagaacgccggtgaattttttagagaccaaggtagacaagtgtatctctcgaggcccccagcctgccctcagggtctgtacgaactgatgctccgatgctggtcgagagagagtgaacagaggcctccgttttctcagctgcataggttcttagccgaggacgcacttaatactgtgtag

SEQ ID NO: 14486 - RNA, 1053 nt, synthetic construct
  misc_feature 1..1053: note = source = /note="Description of Artificial Sequence: Synthetic coding sequence"
  source 1..1053: mol_type = other RNA
atggaggcctttgccttgggaccagcaagacgagggaggagaagaacaagagccgccgggtcattactgagtagagctgcaatcctgctcttcatctctgccttcttagtgcgagtgccatcctccgtcgggcatttagtgcgcctacctagagcatttagactgaccaaagacagcgtgaaaatcgtgggaagcaccagcttccctgttaaagcctacgtgatgctgcatcagaagtccccccacgtcctgtgtgttacgcagcagctgagaaacgctgaattgattgatccatccttccagtggtatggccctaaagggaaagtggtgtctgagaacagaacagctcaaatcacatctacaggttcgctcgtgtttcaaaattttgaggagtcaatgtccggaatttatacctgtttcttagaatataaacccactgtcgaagagatcgtaaagcggcttcagctgaaatatgccatttacgcgtaccgagaaccccactattactaccaatttacagcccgctaccacgccgccccttgtaacagcatttacaatatttcttttgaaaaaaaactgctccagattctgtcgaaacttctgctcgatttatcctgtgaaattagtctgctaaaaagtgagtgccatagggttaaaatgcagagagcgggactacaaaatgagctgttttttgcatttagcgtaagctctctcgatacagaaaaaggacctaaaaggtgtaccgatcataattgtgagccatataagaggctgtttaaggcaaagaatttgatagagcggttctttaatcagcaggtggaaatcttaggaaggagagcagaacagttgccacagatatactacatcgaaggcaccctccagatggtttggattaacagatgtttccctggctacggtatgaatgtgcaacagcaccccaaatgccctgagtgctgtgtcatctgttctccaggctcgtataacccccgtgatggtattcactgtctccaatgcaactcttccctcgtttacggagcaaaaacgtgcttatag

SEQ ID NO: 14487 - RNA, 1392 nt, synthetic construct
  misc_feature 1..1392: note = source = /note="Description of Artificial Sequence: Synthetic coding sequence"
  source 1..1392: mol_type = other RNA
tagcttgctttggtgctgtgcaccgttgattcaagaccccccgctcaattagctctgtcccacgctggccgcctgctcgccagctcaactgccgcctcagtccctaatacacttagactagaactccgcggcccacaacccagagacgagggcttttattcttgctctgccaggtcacctctgggtcaagcaaacacttctctagaactgcgtctcgagggcgtcagagtgatcttggccccggaagccgcagtcccggaaggagccccgattacagtgacttgcgctgaccccgccgcacacgcacctactttgtatacttggtaccataacggccgctggttgcaggaaggccccgccgcctctctaagttttctggtcgcgactcgggcacacgccggagcttattcctgtcaggctcaggacgctcaaggtacacgctcgagcagacccgctgcccttcaggtgctctatgccccccaagacgctgtactttcctcattcagggattcccgggctcgctccatggcagtcatccaatgtacggttgattcagaaccccctgccgagttagcactcagccatgacggaaaagtgctggctacctcctcgggcgttcactcattagcttccggaactggccacgtacaagtagctcggaatgcactccggttgcaggtccaggacgtacccgccggagacgatacttatgtctgtacagctcagaatcttctcggctccatttcgacgattggcagattacaggtagaaggcgcgagagtcgttgccgagccgggcctcgatgtccccgaaggggccgcgctaaatctttcttgccgtctgttaggcgggccgggtccagtcggcaactccacattcgcatggttttggaacgatcgccgcctccatgcggaacccgtacctacacttgctttcacacacgtggctagagcccaggctggaatgtaccactgtctcgcagagcttcccacaggcgctgctgcttctgctcccgtcatgctcagggtgctttatcctcccaaaacgcctacgatgatggtgttcgtggagcctgaaggcggacttcgcggtatcttagattgtcgggttgactccgagcccctcgcaagcttaactctccacttaggcagtcgcctggtggccagctcacaaccacaaggtgcccccgcagagcctcatatacacgtactcgcctcccccaacgcactccgagtagacatcgaagcacttagacccagcgatcagggggaatacatttgctcagccagtaacgtgctcgggagtgctagtacctcaacttacttcggcgttcggggagagggcagagggctgcaccttccagggcactccgcacagaaaccatcttcctag

SEQ ID NO: 14488 - RNA, 1398 nt, synthetic construct
  misc_feature 1..1398: note = source = /note="Description of Artificial Sequence: Synthetic coding sequence"
  source 1..1398: mol_type = other RNA
atgaagtttcagggacctctggcctgccttttgctggctctttgcctcggctctggcgaagccggtcccctccagtccggggaggagagtaccggcactaatattggtgaagctttaggtcatgggctgggcgacgctttatcagagggcgtgggaaaagccatcgggaaagaagctgggggtgccgcaggatcgaaagtgagcgaagccctaggccaaggaactcgtgaggcagtgggaaccggagtgcggcaagtcccaggtttcggtgtggcagacgctttgggcaatagagtgggcgaggcggctcacgctcttgggaacaccgggcacgaaatcgggcggcaggcagaggatgtcatcaggcacggggcggatgcggtgagagggagttggcagggagtgccagggcacaatggagcctgggaaacctcgggggggcacggaatttttggaagtcaagggggcctaggtggacagggacagggcaacccgggaggacttggtacaccctgggtacatggttaccccggcaacagtgccggatcattcggtatgaatccacagggtgccccttggggtcagggaggcaatggtggccctccaaattttggcaccaacacccagggcgcagtggcacaaccgggatatggctccgtccgcgcctccaatcaaaatgaggggtgtactaatccccccccatccggctctggcggcggctcttccaactcaggcggttcaagtaccggcagtagctctggaaaccacggtggcagcggtggaggaaacggtcacaagccgggctgcgaaaagccaggaaatgaggccagggggtctggagagtctggaatccaaggcttccgcggacaaggcgtttcttcaaacatgagggaaattagtaaagagggtaacagactgctgggcggttccggagataattaccgcggacaaggcagttcttgggggtccggagggggtgatgctgtagggggagtgaatacggtgaacagtgaaacaagccctgggatgtttaattttgatactttttggaaaaattttaagtctaaactcggattcattaactgggacgcgattaacaagaatcaggtcccccctccaagcacaagggcactgctgtatttctccaggctatgggaagactttaagcaaaacacaccctttctgaattggaaagctattattgagggcgccgatgctagttctctgcagaaacgggcaggccgcgacgatcagaactacaactacaaccagcacgcataccctacagcctacgggggaaaatacagtgtaaagactccagctaagggaggagtgtccccatcgtcgagtgcttctcgggtccaaccgggattattgcaatgggtgaagttttggtag

SEQ ID NO: 14489 - RNA, 2700 nt, synthetic construct
  misc_feature 1..2700: note = source = /note="Description of Artificial Sequence: Synthetic coding sequence"
  source 1..2700: mol_type = other RNA
atgctgttactactgctccttgcacctctctttctgagacctccgggcgccggcggtgcccagacccctaacgctacttcagaaggatgccaaattattcacccaccttgggagggcgggattagatataggggcctgaccagagaccaggttaaggcaatcaacttcttgcccgtggattacgagatcgagtatgtttgtcgaggggaacgtgaagttgtgggaccgaaagtgagaaagtgccttgctaatggaagttggactgacatggacacaccatcccggtgtgtgaataggacgcctcactcagagagacgcgcggtgtatataggcgctctgttcccaatgagcggtggttggcccggaggtcaggcctgtcagcccgctgttgaaatggctctagaagacgttaatagtaggagagatatattaccggactatgaacttaaactgattcatcacgatagtaagtgcgacccgggccaagccactaaatacctctacgaattattgtacaacgatcctatcaagattatacttatgcctggctgctcaagtgtatcaactctcgtggcagaggctgcacgcatgtggaacttaatagtgctgagttacggcagttcatccccagctttaagcaacaggcagagattcccgacgttcttccgtactcaccccagtgctaccctccacaaccctactagagtaaagctatttgagaaatggggctggaagaagatcgctaccatacaacagaccaccgaagttttcacatccactctagacgacctcgaggagagagtgaaggaagctggaatagaaattaccttcagacagtccttcttcagcgacccagctgtgccagtcaagaatttgaagcggcaggacgcccgcatcatcgtgggactgttctacgagacggaggctagaaaagtgttctgtgaagtgtacaaggaaagactgtttggaaaaaaatatgtgtggttcctgattggctggtatgccgataattggtttaagatatacgatccttctatcaattgtaccgtagatgagatgactgaggctgtggaaggccatatcaccaccgagatcgttatgctgaatcctgcgaacaccagaagcatttcaaacatgacgtcacaagaattcgtagagaagctgaccaaaagactcaaacggcacccagaagagacaggggggtttcaggaagcccctctcgcgtatgatgcaatatgggcacttgcattggctctcaacaagacaagcggcggcggaggcaggagcggtgtgcgactcgaagacttcaattacaataaccagacaattaccgaccaaatctaccgggccatgaacagctcatcctttgagggcgtttcaggccacgtcgtattcgatgctagcggctctagaatggcgtggaccctcattgaacagctccagggagggagctacaaaaaaatcggatattatgactctacaaaagatgatcttagctggtccaaaacagataagtggattgggggctcacctcccgcagaccagactctcgttattaaaaccttccggttcctctcccaaaagttatttatcagtgtctccgtgttatcttcgctgggcatcgtgctagcggtagtctgcttatcatttaatatctacaacagtcacgttcgttacattcagaactcgcaacctaacttgaataacttaacagcggtgggctgtagcctagccttggcggcggtgtttcccttaggactcgacggttaccatatcgggagaaaccaatttccgttcgtctgccaggcccggttgtggctgcttggcctaggtttctccctcggctatggctcaatgttcacgaaaatctggtgggtgcatactgtatttactaagaaagaagagaagaaggaatggcggaagacactggaaccatggaagctgtacgctacagtgggactcttagttgggatggacgtattgacacttgctatatggcagatcgttgatccgctgcacaggactatcgagacattcgctaaagaggaacccaaagaggatatcgacgtaagtattctgccacagttagagcactgttcctcccgcaagatgaatacctggctgggtattttttatggttacaagggtcttctgcttttattgggtatctttctggcttacgaaactaaaagtgtaagcaccgagaaaatcaatgaccatcgcgccgtaggaatggcgatttacaacgtcgcggtcctctgtcttataacagctccagttacaatgatcctctccagccagcaagatgctgcatttgccttcgcttctctcgctattgtgttctccagctatataactctggttgtgctattcgttcccaaaatgagaaggctcattacgagaggcgaatggcagagcgaggcccaggatacaatgaaaaccggaagtagtaccaacaataatgaggaggagaaatcccggctactggaaaaggaaaaccgggaactggagaagataattgccgaaaaagaagaacgggtgtccgagctgaggcaccaactccagtcccgtcaacagttaaggtccagaaggcatcccccgacacccccagaaccatcaggaggattaccgcgaggcccacccgaacccccagatcgactgagttgtgacggatcccgcgtccacctactttacaagtag

SEQ ID NO: 14490 - RNA, 381 nt, synthetic construct
  misc_feature 1..381: note = source = /note="Description of Artificial Sequence: Synthetic coding sequence"
  source 1..381: mol_type = other RNA
atgtggtatgtaagcacccgcggcgtggctccacgagttaatttcgaaggcgccctgttctctggctacgcgcctgatggaggcttatttatgcctgaagaacttcctcagctggacagagggacactgtgccaatggtcaaccctgtcttaccccggccttgtgaaggaactctgcgcgctttttatcgggagcgaactattgccaaaggacgagctgaacgacctaatcgaccgggccttctcccgatttagacacagggaagtcgtgcacctttccagattgcgaaacggtcttaatgttcttgagctttggcacggcgttacgtacgcctttaaagacctctccctctcatgtacaacacaatttctgcaatactag

SEQ ID NO: 14491 - RNA, 147 nt, synthetic construct; identical to SEQ ID NO: 12852
  misc_feature 1..147: note = source = /note="Description of Artificial Sequence: Synthetic coding sequence"
  source 1..147: mol_type = other RNA

SEQ ID NO: 14492 - RNA, 390 nt, synthetic construct
  misc_feature 1..390: note = source = /note="Description of Artificial Sequence: Synthetic coding sequence"
  source 1..390: mol_type = other RNA
atggcagccggatctgcccctatgcaactgcaccttagagccacaatcaggatgaaagacggattatgcgtcccccgaaaatggatctatcacctcaccgaaggaagcaccgaccttagaactgaggggagacccgacatgaagacggaactgttttcaagttcatgtcccggtggcattatgttaaacgagactgggcagggttaccagcgatttctactgtacaatcgatccccacacccccccgagaaatgcgtggaagagttcaagagccttacaagctgcttagatagcaaggccttcctcttgacaccacgcaaccaaggcaagggactaaaaagccataagacggggctcggactgacaaaaagcagcggcgtgaccggctag

SEQ ID NO: 14493 - RNA, 462 nt, synthetic construct
  misc_feature 1..462: note = source = /note="Description of Artificial Sequence: Synthetic coding sequence"
  source 1..462: mol_type = other RNA
atgaccatccatatcctgatacttttattattactcgccttttccgctcagggagacttagacacagccgccagacgcggtcagcaccaggtaccccaacacagggggcacgtatgttacctgggagtgtgccggactcaccgactggccgagataatctactggatcagatgcctgcaccagggcgctttgggggagggacagccaagggcgccgggaccattgcagttgtgggctccaccagtggctaggggcgggagccctgccaggtttcccgggttccgcccagcagcaagagggttggctcagtgccccgcccgttgggtgacgtccggaacagctcgccctcttctcggcttcagcctccctatttgcatgctagagcttcttctgcacatctcatcacctttaacccctgccccagaaactgtgtttccctctccctcgcctggttgtgactag

SEQ ID NO: 14494 - RNA, 450 nt, synthetic construct
  misc_feature 1..450: note = source = /note="Description of Artificial Sequence: Synthetic coding sequence"
  source 1..450: mol_type = other RNA
atggggtggctgacccggatagtatgtctcttttggggagtgctcctgacagctcgggcaaactaccagaacggtaaaaataatgtgccccgactaaagttatcatataaggaaatgcttgagtcgaataacgtgatcaccttcaatgggcttgctaattcttcctcctaccacacattcctgctggatgaggaacgatctcgcctctacgtgggcgcaaaagaccacatattcagttttgaccttgtcaatatcaaagattttcaaaagatcgtttggccagtgtcttatacgagaagggacgaatgcaagtgggcagggaaagacatccttaaagagtgcgctaactttatcaaagtactgaaagcctataatcagacccatctttacgcgtgcggcaccggcgccttccatcctatctgtacatacatagaaattggacatcattag

SEQ ID NO: 14495 - RNA, 543 nt, synthetic construct
  misc_feature 1..543: note = source = /note="Description of Artificial Sequence: Synthetic coding sequence"
  source 1..543: mol_type = other RNA
atggcagatatgcagaacctggtcgagcgtctggagagagccgtggggaggctggaagctgtgtcccacacatcagatatgcatagaggctacgccgatagtccaagtaaagccggcgccgcaccttacgttcaagcttttgacagcctgcttgccgggcccgtggctgaatacctgaagatttcaaaggagattggtggagacgtgcaaaaacacgctgagatggttcataccggcctgaagttagaacgcgcccttttagttacagctagtcaatgtcaacagcctgctgaaaacaaactatctgatcttttggccccaatctccgaacagatcaaagaggtgattactttcagagaaaagaatagaggttccaaattatttaatcatctgagtgcagtgagcgaatctatacaggccttgggttgggtcgccatggcccccaaacctggaccgtacgtgaaggaaatgaacgacgcagccatgttctacactaaccgggttttaaaagagtataaggacgtcgacaagaagcatgtatag

SEQ ID NO: 14496 - RNA, 630 nt, synthetic construct
  misc_feature 1..630: note = source = /note="Description of Artificial Sequence: Synthetic coding sequence"
  source 1..630: mol_type = other RNA
atgggacctgaagcgctttcctcactgctgctgctgttattagttgcatccggcgatgcagacatgaagggacactttgacccagccaagtgccggtatgctctgggcatgcaggacagaacgatccctgacagcgatatttcagccagtagttcttggagtgattctacagctgcccgtcattcacggcttgaatctagcgatggtgatggtgcttggtgtccggcaggctccgtgttccctaaagaggaagaatacctgcaggtggaccttcagcgccttcacctggttgctctagtcgggacacaggggagacacgccggaggacttggcaaggagttttcacgtagctataggcttagatattctagagatggcaggagatggatgggatggaaggaccggtgggggcaggaggtgatctcaggtaatgaagatcctgaaggggtggtgctcaaggatcttgggccccctatggtggcaagattggtaagattttacccccgcgcagaccgtgtgatgtcagtgtgtctacgggttgagttgtacggatgcctttggagagacggtttactgtcatacaccgcaccggttggccagactatgtacctctcagaagccgtttattag

SEQ ID NO: 14497 - RNA, 630 nt, synthetic construct
  misc_feature 1..630: note = source = /note="Description of Artificial Sequence: Synthetic coding sequence"
  source 1..630: mol_type = other RNA
atgggacccgaagctcttagcagccttctgttacttctgttagttgcctcaggggacgctgacatgaaaggacactttgatccagcaaagtgcaggtatgctttgggtatgcaagaccggactatccccgatagtgacatttcagcctcttcttcatggagtgatagtacagcagcgagacattcaaggctagagagctcagacggagacggtgcgtggtgtcccgccggcagcgtatttccgaaggaggaagaatacctccaagtcgacttacagagactacatcttgtggctttagtcgggactcagggaagacacgcaggagggcttgggaaggagtttagccggtcatataggcttcgttattctcgcgatggtcgtaggtggatgggttggaaggatagatggggtcaggaggtgatcagtggcaacgaagaccccgagggcgtcgttttgaaggacctgggacctcctatggtcgccagattagtccgattctaccctagggctgatagagtgatgagtgtttgtttgcgtgtggaactgtatggttgtctgtggcgggatggcctgctgtcatacacagcaccagtcggccagaccatgtacttgtccgaagctgtttattag

SEQ ID NO: 14498 - RNA, 2631 nt, synthetic construct
  misc_feature 1..2631: note = source = /note="Description of Artificial Sequence: Synthetic coding sequence"
  source 1..2631: mol_type = other RNA
atgggacccgaggctctgtcttcactcctgctgttgctcctcgttgcctccggggacgctgatatgaaaggacacttcgatccagctaaatgccgttatgccctggggatgcaagaccggactatccctgattctgatataagcgcctcctctagctggtctgactctaccgcagctaggcattctcgacttgaatccagcgatggggatggcgcatggtgccccgcaggttctgtattccccaaagaagaagaatatctccaagtcgacttacagaggctgcacctggtagctctcgtagggacacaaggccggcatgcgggagggctgggaaaggaatttagtagaagctaccgcctgcgctatagtcgcgatggccgcagatggatgggctggaaggatagatggggacaggaagtgatcagcggtaatgaagatcccgaaggagtagtattgaaggatctgggtccccccatggtggctaggctagtccgtttttatcctcgggccgatcgggttatgagtgtttgcttacgcgttgagctatatggctgcctttggcgagacgggctgttgagctacactgcgcccgtgggtcagaccatgtatttgtctgaggctgtatacctgaacgatagcacatatgacgggcacactgttggaggacttcagtatggcggactggggcagctcgctgacggcgttgtgggtctggatgattttcggaagtcccaggagcttcgggtctggcctggatatgactacgttggctggtctaaccactcattctcctcaggatacgtggaaatggaatttgagttcgatcgcttgagggcatttcaggctatgcaggtgcattgtaataatatgcatacacttggagcccgcttaccaggtggggtcgagtgtcgatttcggcgcggacccgccatggcctgggagggggaacctatgagacacaatctgggcggtaacctgggcgaccctagagctcgagccgtatccgtgcccctgggcggccgcgtcgccagattcctgcagtgccgcttcttattcgctgggccgtggctgcttttttctgagatctcgttcatcagtgacgtagttaataacagctcacccgcgttgggcggaaccttcccccccgctccatggtggcctccaggcccaccaccaactaacttctctagccttgaactcgagcccagaggccagcagcccgttgcaaaggccgaagggtctcctacagccatcctgataggttgtctcgtcgccattatcctgctgctgctgttgatcatagctctgatgttgtggagattgcattggcggagactcttgtccaaggcggagcgaagagtcctggaggaggaacttacagtacacctgtcagtccccggcgatactattcttatcaacaatagacctggtccccgagagccccccccatatcaagagccccgcccacgcggcaaccccccccattcggccccttgcgtccccaatggcagtgcctactcaggagactatatggaacctgaaaaacccggagccccactcctgcctccaccaccacagaacagcgtgccgcattatgctgaagcagatattgtgaccctccaaggagtgaccggcggaaacacttatgctgtaccagcgctgcccccaggagcggtgggtgacgggccccccagggttgactttccaaggtccaggctacggttcaaggaaaaattgggagaagggcagttcggtgaagtgcatctatgcgaggtggactcgccccaagaccttgtgtccctcgatttcccgcttaacgtccgaaaaggccaccctcttttggttgcagtgaagatcctccgccctgatgccactaagaacgcacgcaacgacttcctgaaagaagtgaaaatcatgagccgacttaaagaccccaatattataagactgcttggcgtttgtgtgcaggacgatccactgtgcatgattactgattacatggagaatggagacctaaaccagttcctgtctgcacatcaactggaagacaaagccgccgaaggagcgcctggggatggacaagccgcgcagggccccactataagttacccaatgttgctccatgttgccgcacagatcgcatccggaatgcggtatctcgctacgctcaacttcgtgcaccgagatcttgccacacgtaactgtctcgttggcgaaaatttcacgatcaagattgccgactttgggatgtcacggaacctctatgccggtgactattacagggtacagggacgagccgtattaccaatcagatggatggcttgggagtgcatcctcatgggcaagttcaccaccgcctctgacgtttgggcctttggcgtgaccttatgggaggtgttgatgttgtgtagagcccaacccttcggccaacttacagacgaacaagtgattgagaatgccggagagttttttcgggatcaaggtcgacaggtgtatttgagtcggccaccagcctgcccgcaggggctgtatgaacttatgctccggtgttggtcccgtgagtcagagcagagaccaccattcagccaattacacagattcctcgccgaggacgctttaaataccgtgtag

SEQ ID NO: 14499 - RNA, 2103 nt, synthetic construct
  misc_feature 1..2103: note = source = /note="Description of Artificial Sequence: Synthetic coding sequence"
  source 1..2103: mol_type = other RNA
atgctcgcccctttccttctccttttgactcacagcagatccccgcttagcttcagaccttgttcacatgtgcctggggcactcatcgcacagaagccaatgggctcttctcgacttgctgcattactcctgcccctgctcctgatcgtcatcgacctctccgactctgcaggcattggctttagacacttaccacattggaatactcggtgtcccctcgccagccataccgatgatagctttacaggatcgtccgcatacatcccttgcagaacttggtgggcattgttctcaactaagccttggtgtgtgcgtgtctggcactgtagtcggtgcttatgtcagcatctattgtcgggaggctcagggctgcagcgtggattatttcacctcttagtgcaaaagtcgaaaaaatcttctacgttcaaattttatcggcgccataagatgcctgctcctgctcaacgaaagctccttcctagaagacatttatccgaaaagagtcaccatattagtatccccagcccggacattagtcataagggcttgagatccaaacggactcagcctagcgatccagagacctgggaatccctgccccggctcgactctcagcgccatggaggcccagagttttcattcgatctcttacctgaggccagagccatccgtgttactatatccagcggtcccgaagtcagtgtacgcctgtgccaccagtgggccttagaatgcgaggagctttcatcaccctacgacgtccagaaaatagtcagtggtggacacaccgtggagctaccatacgaattcctgcttccatgcctttgtatcgaagcatcctatcttcaggaagatactgtcagaagaaagaagtgtcccttccagtcttggcctgaagcctatggcagtgacttctggaagagcgtacacttcaccgactactcccagcacacacaaatggtgatggcccttacactgagatgcccattgaaattggaagcagcactttgtcagcggcacgactggcacactttatgtaaagacctgcctaatgcgaccgcgagggaatctgatggctggtacgtcctcgagaaggtggatctgcatccccagctgtgctttaagttttctttcggtaactcgtctcacgttgagtgtccacatcagacaggctcacttacgagctggaatgtttctatggatacccaggcccaacagctgatacttcatttctcctccaggatgcatgccacctttagtgctgcttggtcccttcccggcctcggtcaggacactcttgtcccacccgtctacaccgtgtcccaggcccgtggtagcagtcctgtgtctctggatctaatcataccttttctgcggcccggatgctgcgtacttgtttggcgaagtgacgtgcaattcgcgtggaaacacctactgtgccccgatgtctcctatcggcaccttggtttactgattcttgctctgctggcgctgttgacccttcttggggtggtcctggctttgacctgtcgcagacctcagagcggacctggcccagcgagacccgtgctcttactgcacgccgctgactcagaagcacagaggagacttgtgggagccctcgctgagctgttgagagccgctctaggcggtggacgcgacgtcatcgttgacctttgggaaggcaggcacgtcgctagggttggtccacttccatggctttgggcagcgaggactcgtgtagcccgggaacaggggaccgtgttactcctttggagcggagccgaccttagacccgtaagcgggcctgatccgcgtgctgccccactgctcgcactcctccacgccgcaccaagaccccttcttctgctggcatacttttctcgactatgcgccaaaggcgacatcccccctccactccgcgcgctcccaagataccgcctgctccgcgatcttcctagactgctcagggctctggacgctcggccttttgcggaggccacaagctggggtcgcctgggcgccagacaaagacgccaaagcaggttagaactttgctccagactcgagcgtgaagccgcacggctcgctgatctgggctag

SEQ ID NO: 14500 - RNA, 1194 nt, synthetic construct
  misc_feature 1..1194: note = source = /note="Description of Artificial Sequence: Synthetic coding sequence"
  source 1..1194: mol_type = other RNA
atgagatcattattgttgctttcagctttctgcctgcttgaggctgccttagccgcggaagtcaagaaacccgccgccgcagctgctccaggaactgccgaaaagttaagtcctaaggccgccacattggccgagcgttcagctggcctcgccttttccttatatcaggcaatggccaaagaccaggccgtagaaaatattctggtatcacccgtagtggttgcttcttcattgggcttggtctcactgggaggtaaagctactactgcttcccaggcaaaggctgtgctgtccgcagagcagctccgtaatgttacatggaaattaggatcaaggctctacggcccttcctctgtgtcattcgcggatgacttcgttcgaagctccaagcaacactacaactgcgaacacagcaaaatcaacttcagagataagcgatccgctcttcagagtataaacgaatgggccgctcagactactgacgggaaactccctgaagtaactaaggatgtcgagcggacagacggcgcgctgctggtaaacgccatgtttttcaagccccactgggatgagaagtttcaccacaagatggtcgataatcggggatttatggtgacaagaagttacaccgtgggcgtaatgatgatgcatcgcacaggcttatacaattactacgacgatgaaaaagaaaaactgcaaattgtcgaaatgccgttagcccacaagcttagctcacttatcattctgatgcctcaccacgtagaacccctggaaaggttggaaaaactattaacaaaggagcagctgaaaatatggatgggtaaaatgcagaagaaggccgtggctatctcactgcctaaaggcgtagtggaggtgacacatgacttacagaagcacctcgccgggttaggactcactgaagcaatcgataagaataaggctgacctgagcagaatgtctgggaagaaggatctgtatctggctagcgtgtttcatgcaaccgccttcgagcttgatactgacggtaatcctttcgaccaggatatctatggccgggaagaactgcgatcacccaaattgttctatgctgaccaccctttcatttttcttgttagagatacccagagcggcagtttgctcttcatcggacggctggtgcgcccaaaaggagataagatgcgcgatgaactgtag

SEQ ID NO: 14501 - RNA, 612 nt, synthetic construct
  misc_feature 1..612: note = source = /note="Description of Artificial Sequence: Synthetic coding sequence"
  source 1..612: mol_type = other RNA
atggcagatatgcagaatctcgtagagcgacttgagagggccgtcggcagactcgaagctgtctcccacacaagcgacatgcaccgaggatacgccgattcccccagcaaagctggagccgccccttatgtccaggcatttgactccctactcgccggcccggtcgcagaatacctcaagatatccaaagaaattggtggtgacgtccagaaacatgccgaaatggttcacacgggcctcaaattagagcgggcgctgctggtcaccgcgtctcaatgtcagcaacccgcagagaataagttgagtgacctcctggctcccatctccgagcaaataaaagaagtgatcacttttagggagaaaaatagaggctccaaactcttcaaccatctttccgccgtttcagagagcatccaggccttaggatgggtagctatggcccctaaacctggcccttatgtaaaagaaatgaacgatgcggccatgttctacaccaaccgggtgctgaaagaatataaggatgtggacaagaaacacgtcgactgggtaaaagcatacctttcaatttggaccgaattacaagcatacatcaaggaatttcacactacctag

SEQ ID NO: 14502 - RNA, 1293 nt, synthetic construct
  misc_feature 1..1293: note = source = /note="Description of Artificial Sequence: Synthetic coding sequence"
  source 1..1293: mol_type = other RNA
atgagaaagctgatgaaacaagtgcaagagcagtgcccgaatataactcgcatctattctatcggaaagtcctatcagggactgaagctatacgtgatggaaatgagtgataagcctggagaacatgaactcggagaacctgaagttaggtatgttgcaggaatgcacggaaacgaagccctaggaagggagctccttctgcttctgatgcagtttttatgccatgagttcctccgtggaaatccgcgcgtcaccagactcctctctgagatgcgtattcacctgttaccttcaatgaacccagatggctatgaaattgcttaccatcgcgggagcgagttagttgggtgggcagagggccgctggaataaccaatcgatagatcttaaccataattttgccgacttaaatacccctctgtgggaagctcaagacgacggaaaggtccctcacatcgtgccaaatcatcatttacctttaccgacctactacaccttgccaaacgccacagttgcccccgagacacgagccgtaatcaaatggatgaagcgtataccctttgtgttaagtgccaatctacatggaggcgagctggttgtctcctacccctttgacatgactagaacaccatgggctgcgcgggaactgacccctaccccagacgatgcggtctttcgctggttgtccacggtgtacgctggctccaacctggctatgcaagacacaagccgacggccttgtcattctcaagacttttcagtccacggcaatattattaacggagcagactggcacaccgtccccggctcaatgaacgacttttcttacttacataccaactgctttgaagtcaccgttgaactctcttgtgataagttccctcatgaaaacgagcttccccaggaatgggagaataacaaggacgccctgctgacatatttagaacaagttcgaatgggcatagccggcgtggtccgtgacaaagacacggagctcggtattgcggatgcagttattgccgtggacggaatcaatcacgacgtgaccactgcctggggaggcgactactggagacttcttactcccggcgactacatggttaccgcaagcgccgaggggtaccactcagtgacccgtaactgtagagtgacgtttgaagagggtccgtttccttgcaacttcgtgctgaccaaaacgccaaaacagagattgagggaactgctggctgccggggctaaggtccctccagacttgcggaggaggttagaaagactcaggggacagaaggactag

SEQ ID NO: 14503 - RNA, 1680 nt, synthetic construct
  misc_feature 1..1680: note = source = /note="Description of Artificial Sequence: Synthetic coding sequence"
  source 1..1680: mol_type = other RNA
atgtggacaaacttctttaagctcaggctcttctgctgtcttctggctgtacttatggtcgtagtccttgtcatcaacgtcacccaggttgagtacctggatcatgagacagtctccgccactttcatcgactcctctggccaattcgtgtctagccaagttacaggtatttccaggaatccctattgtgggtacgaccaacaaaccctctcctctcaggaacgcatggaagaagactcccttctggccgccctgcacaggcaggtgcccgacgtcggaccagtacccttcgttaaatctacagatccgagctcatcctatttcgtgattctgaactctgcagccttcttcaaggttggatcacaattggaggtgttggttcacgtgcaagactttcagcgcaaaccaaagaagtacggtggtgattaccttcaggcacggattcattcactgaagctacaagcaggcgcggtaggccgcgtcgtggactatcagaatggattctataaggttttctttacactcctctggcccggcaaagttaaagttagcgtgtctcttgttcatccatctgagggcatacgggtgttacaaaggctccaagaggataagcccgacagagtctattttaaatccctcttccgaagcggacggatttcggagacaacagagtgtaacgtgtgtttaccaggcaatctccccctttgcaatttcaccgacttgtataccggggaaccatggttttgtttcaaacctaaaaagctcccttgctcctcccggatcacccatttcaaaggaggttatctcaagggtctcttaacagcagctgagagtgcttttttccaatcgggggtaaatattaaaatgccggtcaattcttctggccccgactgggttaccgttatcccgcgccgaattaaagaaacgaactctcttgagctgtcccaaggtagcggaacctttccctcaggatactattataaagaccagtggagacctcgcaaatttaagatgcgacagttcaatgaccctgataacataacagagtgcctacaacggaaagtggtgcatttatttggcgactccaccatacgacagtggttcgaatacctgacaacttttgtcccggatctggtcgagttcaatctcgggtcacctaaaaatgtaggccccttccttgcagttgaccagaagcacaacatacttctcaagtaccgatgtcacggcccgccaattcggtttactaccgttttcagcaatgaactgcactatgtggccaacgaactcaacggaatcgttgggggcaagaatactgtcgtcgccatagctgtgtggtcccatttcagtacctttcccctggaagtgtacattagacgcctgcggaatataagaagggccgttgtgcgcctgttagatcgtagtccaaagacggtggtggttatcagaacagcaaatgcccaggagctaggtccagaagtctcactgtttaactctgactggtacaattttcaattggacaccatccttcgccgcatgttttccggtgttggggtatacttggttgacgcttgggaaatgactcttgcccactatcttccgcacaaattacatccagatgaggtaattgtaaagaatcagctggacatgttcctgtcgtttgtctgtccactggaaacatag

SEQ ID NO: 14504 - RNA, 8199 nt, synthetic construct
  misc_feature 1..8199: note = source = /note="Description of Artificial Sequence: Synthetic coding sequence"
  source 1..8199: mol_type = other RNA
atggagcagaccgattgcaaaccttaccagcccctccccaaggttaagcatgaaatggacttggcttacacatcttccagtgatgagagtgaagacggacggaaaccacgccaatcatacaatagccgtgagaccctgcacgagtacaatcaagaactgaggatgaactacaactcacagagtagaaagcgcaaggaagtcgaaaaaagcactcaggagatggaattttgtgaaacctctcatacactatgtagcggctaccagacggatatgcacagtgttagtaggcatggctaccagctggagatgggatctgacgtggataccgagaccgaaggcgccgcctcaccagatcatgccctccgcatgtggatcagaggaatgaagtccgaacatagttcatgtctctcatcacgcgcaaattccgccctgtccctcaccgacaccgatcatgaaagaaaaagcgatggagaaaacggattcaagtttagtccggtttgctgcgatatggaagcccaagcggggagcacgcaggatgtgcagagttctccccataatcaattcacttttcggcccctcccgcccccccccccaccaccccacgcctgtacatgcgcacgcaagccgccaccagccgcagactctctccaacggcgatctatgacgactcgcagtcagccctcccctgcagcgccagcccctcccacatcaacacaagactctgtacatctgcacaattcctgggtgctaaactccaatatacctctggagacacgacatttccttttcaagcacggaagcggctcttccgccattttctctgcagctagtcagaactaccccctaacaagtaacactgtctactccccacctcccaggccccttcctcgttccacctttagcaggccagcttttactttcaataaaccttacagatgctgcaattggaagtgtactgcgctgtcagcgaccgccattaccgtcacactcgccctcttgttggcctatgtaattgctgtacatctctttggactgacttggcagttgcagccagttgaaggtgaactttacgctaacggagtcagtaaaggaaatagaggcactgaaagcatggataccacgtatagccccattggcggaaaggtttccgacaaatctgaaaagaaggtgttccagaaaggacgggcaatagatacaggagaggtggacataggagctcaggtcatgcagaccattccgccagggcttttttggagatttcagattacaatccatcaccccatctatttaaaattcaacatctccctggcgaaggactccctacttggaatctacggaagacggaacatcccacccacacacacacaattcgatttcgtgaaactgatggatggtaagcagctggtgaaacaagatagcaaaggttcagacgatacacaacatagcccccgcaatttgatactgactagtctacaggaaacagggtttattgaatatatggatcaggggccatggtatttggcattctacaatgatggcaagaaaatggaacaggtgtttgttttaacgacagccattgaaatcatggacgactgctcgaccaactgtaacggaaatggtgagtgtatctcaggccactgccactgttttcctggattcctcgggcctgattgcgcaagagacagttgtccagttctctgcggaggtaacggggaatacgaaaagggacattgtgtgtgcagacatggttggaaaggcccagagtgtgacgttcctgaagagcaatgtattgatccgacctgtttcggacacgggacttgtataatgggggtctgtatatgtgttcccggctacaaaggagaaatttgtgaggaggaagactgtctcgatccgatgtgttccaatcatggcatctgtgtcaaaggcgaatgccattgcagcaccgggtggggcggagtgaactgtgaaacgccgcttccagtctgccaggagcagtgctcaggccacggaacctttttgctcgatgcaggcgtttgttcttgtgatcccaaatggactggctcagattgttcaacagaactgtgcaccatggagtgtggttcccacggtgtttgttccagagggatatgtcaatgcgaggagggatgggtcgggccgacatgcgaggaaaggagttgtcacagtcactgcaccgagcatggccagtgcaaggatggaaagtgtgaatgcagcccaggctgggaaggggaccactgtaccattgctcactacctggatgctgttcgcgatggatgccccggtctctgctttgggaacgggaggtgcactttggaccaaaacggatggcactgtgtttgtcaagtgggctggtcaggtaccggttgtaatgttgtcatggaaatgctgtgcggggataatcttgataatgatggggacggcctcacagattgcgtggacccagattgttgtcagcaatccaattgttatatctcccccctttgccaagggtctcctgatcccctagatcttatacagcagtctcaaacactgttcagtcagcatacttcccggctgttttatgaccgaattaagttcctgatagggaaagatagcacacacgtcatcccgcctgaggtctctttcgacagtagacgagcctgcgtgatccgtggccaggtcgtggcaatcgatggcaccccactagtgggagtcaacgtctcatttcttcatcattccgactacggattcaccatttcccgacaggatggatctttcgatctagtagcaatcggcgggatctcagtcatcttgatctttgaccgatccccttttctgccagagaagcgcacactgtggttgccttggaaccagttcattgttgtagagaaggtcaccatgcagagagtcgtctctgatcccccttcttgcgatatcagtaacttcattagtcccaaccctatcgttctcccatcccccttaacttcgtttggcggcagctgccccgagagaggcacaatcgttccagaattgcaagtggtgcaggaggagattcccatccctagctcctttgtacgcctgtcctacctttcgtctcgaaccccaggatacaaaacacttcttaggattctccttacacattctacaattccagtcggcatgattaaagtccaccttacagttgcggttgaaggtcggctcactcaaaagtggttcccagccgccataaacctggtgtatacctttgcctggaacaagaccgacatttatggtcagaaagtgtggggcctggccgaagctttggtgtcagtcggttatgagtacgagacctgcccagacttcatattgtgggaacaaagaaccgtggtgctccagggcttcgaaatggatgccagtaatctgggtggatggagtctcaataagcatcatattttaaatccacagtcaggtataattcataagggcaacggagagaacatgttcatttctcagcagccaccggtcattagtactatcatgggaaacggacaccagagatccgtagcctgtacaaattgcaacggtccagcgcataataataaactgtttgccccggtcgccctcgcctcaggtccagatggatcagtgtacgtgggagactttaattttgttagaagaatctttccctcaggcaactcggtctcaatactggagcttagaaaccgcgataccagacattcaacgtccccagctcacaagtattaccttgcaatggacccagtatcagagtcattgtatcttagcgacaccaatacccggaaggtgtataagcttaaatcccttgtggaaaccaaagacctttccaaaaattttgaggtggtggcaggcacaggtgaccagtgcttaccatttgaccagtcacattgcggggatggaggaagagcttcagaagcgagtttgaacagcccccgggggattaccgtggatcggcacggctttatctacttcgtcgacggtactatgatacgaaaaattgatgaaaacgcagtaatcacaaccgtgattgggtctaatgggttgactagcacccaacctctctcttgcgattctggaatggacataacccaggtcaggctcgagtggccaactgatctagctgtgaaccctatggacaatagcctgtatgttctcgacaacaacatcgtacttcaaatatctgagaacagacgagtacggattatagctggcaggcccatacactgtcaggtcccgggaattgaccactttttagtcagtaaagttgccatccatagcaccctcgagagtgcaagagccattagtgttagccattccggtcttctctttatcgcggagaccgacgaacggaaggtgaatagaatccagcaggtgacgacgaacggggagatttatattattgcaggcgcacccactgactgtgactgtaagatcgatcccaactgcgattgtttctcaggagatgggggctatgcgaaagatgccaaaatgaaggcaccatcctcattggctgtttcccccgacggaactctttacgtggccgacctgggcaatgtgcgtattaggactattagcagaaatcaagctcatctgaatgacatgaatatctatgaaatagctagcccagccgaccaggaactgtaccaatttactgtgaacggcacgcacctgcatactcttaatctcatcactagggattacgtgtataatttcacttataatagcgaaggcgacctcggagcaattacttccagtaacggtaattcggtccacattaggcgagatgctggcggtatgcccctgtggctggtcgttcctggtggacaggtctactggttgaccataagctccaatggagtgctgaaacgcgtgtcagctcaaggatacaacttagctttaatgacgtaccctggtaatactggcctgctcgcaacgaaaagtaatgaaaacgggtggacgactgtgtacgaatacgatcctgagggccacctgaccaatgcaacgttcccaacaggtgaggtcagctcttttcactccgacttagaaaagctgactaaagtcgaattggatacctctaacagagagaatgtactgatgtcaactaacctgacagccacttccacaatctatattcttaaacaagaaaacacacaatctacgtaccgcgtcaatcccgatggctctctgcgggtgactttcgcttcgggaatggaaattggcctttcatccgagccccatatccttgcgggggcggttaacccaaccctaggtaagtgcaacatctccttgcccggtgagcacaacgccaacctaatcgaatggagacagagaaaggagcagaacaagggaaacgtgagcgcttttgagagaagacttcgagcccacaacaggaatctgctgagcattgatttcgaccacataacccgcactggaaaaatttacgacgaccatcgcaagtttactctgagaattctttatgatcaaaccggacgtcctattctttggtcccccgtgtcacgctacaatgaagtaaacataacttactcaccgtcaggcctcgtaacttttatccagagaggcacctggaacgaaaagatggagtatgaccagagtgggaagataataagccgcacctgggctgacggaaagatctggtcctacacatacctcgaaaaaagcgtgatgttgctgctgcatagtcagagaagatatattttcgagtacgaccaaccagattgcctgctctctgtgactatgccttctatggtgagacactcgctccaaactatgctgtcagtgggttattaccgcaacatctacacgcctccagactcatccacttcattcattcaggattactcgcgcgatggtcgcctcttacagactctacacttaggtaccggccgaagggttctctacaagtacaccaaacaagccaggctgtccgaagtactgtacgataccacccaggtcacccttacttatgaagaatccagcggcgtgataaagaccatccatttgatgcacgacgggttcatctgcacaataagatatagacagacaggacctctcataggccggcagattttcagattcagcgaagaaggactagtgaatgcgcgattcgattatagctacaacaattttcgggtaacctccatgcaggccgtgatcaacgagaccccgctgcctatagacttgtatcgctacgtggatgtgtctgggaggaccgagcagtttggcaaattttccgtgattaattatgacttgaaccaagtaatcacaacaacagttatgaaacacactaaaatcttctccgcgaacggtcaggtaatcgaggtgcagtacgagatcctgaaagctatcgcttattggatgaccattcagtatgataacgtcgggaggatggttatttgtgacatcagagttggggtggacgctaacatcaccagatatttttacgagtacgatgccgatggccaattgcagaccgtaagcgtgaacgacaagacacagtggcgttattcatatgatctaaatggaaatattaacctactttcccacggtaagagtgccaggctcacaccccttagatatgacctgcgagatcggatcactcggcttggcgaaatccagtataaaatggatgaagacgggttcctcagacagcggggaaacgatatatttgagtataattcgaacgggctactgcagaaagcatataacaaggcttccggctggacggtacagtattattatgacgggctcggtcgtcgcgttgctagtaagtcttcactcgggcaacacctgcaattcttctacgcagacttgacaaatccgatacgcgttacccacctctacaatcacactagctctgaaataacatctctctattacgacctgcagggacacctcattgccatggagcttagcagtggggaagaatactatgtagcatgcgataacacagggacccctttggcagtattttcatccagaggacaggtcatcaaggaaattctgtacaccccctatggcgatatataccatgacacctatccagacttccaagtaatcatagggttccatggaggcctatacgattttctgactaaactggtgcacttgggacagagagactatgatgtagtcgcaggccggtggactacccccaaccatcacatttggaagcagctaaacctactacctaagccatttaacttgtactctttcgaaaacaactatccggtgggtaagatacaggatgtagccaaatacacaacagacattcgtagctggctggaattgttcggctttcaacttcacaacgtcctccctgggtttcctaagcccgagctggaaaatcttgaactcacctatgaattgttgcggttgcagaccaagacgcaagaatgggatcccggaaagacaatattgggtatccagtgtgaacttcagaagcagttaagaaattttatttccctggatcagttgcccatgactcctagatacaatgacggcaggtgtttggaagggggaaagcaaccgagattcgccgctgttccctcggtgtttggtaaagggattaaattcgccattaaggacggcatagtgacagcagatattataggcgtggcaaatgaagactcgcgacgcttagcagccattctcaataatgcacactatttggagaacctgcattttaccatcgaaggaagagatactcactatttcattaaactgggctccctggaagaagacttggtgctgataggaaatacagggggcaggcgcattctagaaaacggcgtgaatgtgacggtgtcacagatgacttcagtcttgaacggaagaactaggagatttgcagacattcaactacagcacggcgctctgtgctttaacatccggtatggcacgactgttgaggaagagaaaaatcacgttctcgaaatcgctagacaacgtgctgttgcccaggcatggacaaaggagcaaaggagattacaggagggagaggagggcatcagggcctggacagagggcgaaaaacagcagctgctctctacgggaagggtgcaagggtatgatggatactttgttctgagcgtggaacaatacctggaattatccgatagtgccaacaacatccattttatgcgccagagtgagattggtaggagatag

SEQ ID NO: 14505 - RNA, 264 nt, synthetic construct; identical to SEQ ID NO: 12866
  misc_feature 1..264: note = source = /note="Description of Artificial Sequence: Synthetic coding sequence"
  source 1..264: mol_type = other RNA

SEQ ID NO: 14506 - RNA, 1233 nt, synthetic construct
  misc_feature 1..1233: note = source = /note="Description of Artificial Sequence: Synthetic coding sequence"
  source 1..1233: mol_type = other RNA
atgagagcctgcattagtctggttcttgccgtgttgtgtggcctggcatgggcagggaaaatcgagtcatgtgcctctagatgtaatgagaagttcaaccgggacgccgcctgtcaatgtgatcgcagatgtttatggcacgggaattgttgcgaggattatgaacatttatgcactgaggaccataaagagagtgagcctctgccacaacttgaggaggagacagaagaagcgttagcctccaatctttacagcgccccgacgtcgtgccaaggtcggtgctacgaggcttttgacaaacatcaccagtgtcactgcaacgccaggtgtcaagaattcggcaactgctgtaaagactttgaatccctgtgtagtgaccacgaagtatctcacagctccgacgctataaccaaagaagagatccagagtatatcagagaagatctatcgagcagacacgaacaaggcccagaaggaggacatcgtgctaaactcccaaaattgcatctcgccatccgaaactagaaatcaagtcgatcgctgtcctaaaccactctttacctatgtgaacgaaaaactgttttccaagcccacctatgcggcctttattaacctccttaacaattatcagagggctacaggtcacggagaacatttcagtgcgcaggaactggcagagcaagacgcctttcttagggaaataatgaaaacagctgtgatgaaagagctctacagttttctgcatcaccagaacaggtatggatcggagcaagagtttgtggatgacttaaaaaatatgtggtttggtttatactctagaggcaacgaggagggagactcatccggttttgagcatgtcttttcaggcgaggtaaagaagggtaaggtgaccggatttcataattggataaggttttacttggaagaaaaggagggactggtcgactattactcccacatatacgacggcccctgggattcataccctgacgtgctggctatgcagtttaattgggatggttactacaaggaagttggctccgcattcataggttctagccctgagttcgagttcgcattatactcactttgctttatcgcaagaccggggaaagtgtgtcagttatcactgggcggctaccccctggccgtgagaacgtacacctgggacaagagcacctatgggaatggaaaaaaatacattgccaccgcttacatcgtcagttcaacatag

SEQ ID NO: 14507 - RNA, 351 nt, synthetic construct
  misc_feature 1..351: note = source = /note="Description of Artificial Sequence: Synthetic coding sequence"
  source 1..351: mol_type = other RNA
atggcagcgggaagtgcacctatgcagctgcatctgcgagctacaatccgaatgaaagatggtctctgtgttccccggaaatggatttatcatctcacagaaggttcaactgacctacgaaccgagggtcgaccagatatgaaaacagaactgttctcatccagttgtcctggcgggattatgctcaacgagaccggacaggggtaccaaaggttcctcttgtataacagatccccacatccaccagaaaaatgcgttgaggagttcaaatcgctaactagctgtctcgattccaaagcctttctccttacaccaagaaaccaggaagcatgcgaactgtcaaataactag

SEQ ID NO: 14508 - RNA, 1200 nt, synthetic construct
  misc_feature 1..1200: note = source = /note="Description of Artificial Sequence: Synthetic coding sequence"
  source 1..1200: mol_type = other RNA
atgtctgcccgtggtcggtgggaaggcgggggccggcgggcttgccgcggcagtctgggactggcaagggcccagggcgctgaacgagtcactagttcagaacagcgacccgccatggcgtctttaggtctccttctcctgttactcctcacagcactgcctcctctgtggtcatcctccctaccaggtctggatactgctgaatctaaggccacaatcgctgatctcatcctgtctgccctggagagagcaacagtattccttgagcagaggttgcccgagatcaacctagacggcatggtgggcgttagggtcctggaggaacagcttaagagtgtcagggagaaatgggctcaggaacccttacttcaacccctatccctgcgggttggaatgctaggggagaagctagaggccgccatccaacgctcactgcactatctcaaattgtcagatcccaaatacctgcgcgagtttcagcttactcttcaacccggcttctggaagttgccccatgcatggatacacactgatgctagcctagtgtacccgaccttcggtccccaggattccttttcagaagagaggagcgatgtatgcttggtacagttactgggaacgggcacagacagctcagaaccctgtgggctctctgatctgtgtaggagccttatgactaaacccggctgttccggctactgtctgagccaccagttgttattttttctctgggctcgaatgagaggatgtactcagggaccactgcaacagagccaagactacattaatttattctgtgcgaatatgatggacttgaaccgccgtgcagaggcaatcggttatgcttatcctacacgggacatcttcatggaaaatattatgttttgtggtatgggtgggttctctgacttttataaattgcgctggctggaagccatcctttcatggcaaaagcagcaagagggctgtttcggtgaacccgatgctgaggatgaagaactttccaaagcaatacaataccaacaacacttctcaagacgggtcaagagaagggaaaaacaatttcccgacggctgctcatctcacaataccgcgactgccgtcgccgccctgggaggcttcctctacatccttgctgaataccccccggccaaccgcgaacctcacccctcgactccgccccctccatctagtaggtag

SEQ ID NO: 14509 - RNA, 510 nt, synthetic construct
  misc_feature 1..510: note = source = /note="Description of Artificial Sequence: Synthetic coding sequence"
  source 1..510: mol_type = other RNA
atgctctcctcagtggttttttggggcctgatagcattaatagggacatccagaggcagctatcctttcagtcacagcatgaaaccacatctgcacccaagactttaccatggttgttacggagatattatgacaatgaagactagtggcgccacctgtgatgctaatagtgtaatgaactgtggcattagaggttccgaaatgtttgcagaaatggatttacgggccataaagccctatcagacattgatcaaggaagtaggacagagacactgtgtggatccggcggtgattgccgctattatttctagggagagtcacggggggagtgtgcttcaggacggatgggatcatagaggcctgaagtttgggttgatgcaactggataagcaaacctaccaccctgttggtgcatgggattccaaagagcatctatcacaggccacggggatacttacggaaagaatcaaggcaattcagaagaaatttcctacctggagtgtggcttag

SEQ ID NO: 14510 - RNA, 468 nt, synthetic construct
  misc_feature 1..468: note = source = /note="Description of Artificial Sequence: Synthetic coding sequence"
  source 1..468: mol_type = other RNA
atgactagtctcaaatgtggtgagaacctgtacatgtcatccgcttccagttcatggtcacaagcaattcagtcctggttcgatgaatataacgactttgacttcggtgtcggtcctaagactcccaacgccgttgtgggccactatacacaggtcgtgtggtatagcagttaccttgtaggctgcggcaacgcctattgtccaaatcaaaaggtgctgaagtattattatgtatgtcaatattgtcccgcggggaattgggccaacaggctgtacgtcccatatgagcagggagctccttgtgcctcctgccccgataactgtgatgatggtctttgtacaaacgggtgcaaatatgaagatctgtactccaattgtaagtcactaaagttgaccttgacatgtaagcaccagctagtgagggacagctgcaaagcatcatgcaactgctctaactccatctactag

SEQ ID NO: 14511 - RNA, 2886 nt, synthetic construct
  misc_feature 1..2886: note = source = /note="Description of Artificial Sequence: Synthetic coding sequence"
  source 1..2886: mol_type = other RNA
atgttgttactcctcctgttggcaccactgtttctgcgtccacctggagcaggcggagcccagacccccaacgctactagtgagggatgccagattattcaccccccatgggaaggcggaattagataccgcggcctgacgagagaccaggtgaaagctattaatttcctccccgtggattacgaaatcgaatacgtctgtcgaggcgaacgggaggttgtcggacccaaggttagaaagtgcctggctaatggatcatggactgatatggataccccctctagatgtgtgaggatctgcagcaaaagctacttgacactggagaatggcaaagtgtttctgacgggaggagatctgccggcactagacggggcgcgcgtcgattttaggtgtgaccctgactttcacttagtgggcagcagccgctcaatttgctcacagggccagtggtccacacccaagccccattgccaggtgaacaggacccctcactccgaacgtcgtgctgtctatatcggtgccttattccccatgagtggtggctggcccggcggacaggcatgccaaccggccgtagaaatggctctggaggatgttaattctagaagagatatacttcctgactatgaacttaaattgatccaccacgatagcaaatgcgatccaggccaagctacaaaatatctgtacgagctgctttacaacgaccctattaagattattctcatgcccggatgtagttctgtatctactctggtagcagaagccgctcgcatgtggaatctcatcgtcctttcttatggttcaagctcacccgctctgagtaacaggcaacgcttcccaacttttttccgcacccatcctagcgccacactgcataaccctacccgggtcaagctcttcgaaaagtggggatggaaaaaaattgcaaccattcagcagacaactgaagttttcactagcacacttgacgatttggaggaacgggttaaagaagctggaatcgaaatcacgtttagacagtcgtttttttctgacccagcggtgcctgtgaagaatctaaaacggcaggacgcaaggattatagttgggttattttatgaaacagaagcccggaaagtgttttgtgaggtttacaaagagagactcttcggaaagaaatacgtgtggttcctgatcggctggtacgcggataactggtttaaaatttatgaccctagtattaactgcacagtggacgaaatgactgaggctgtagaaggtcatattacgacagagatcgttatgctcaaccctgcaaatacccgatccatttccaacatgacctcccaagaatttgtagaaaagctgacgaaacgcctcaaacggcatccagaagaaaccggcggattccaggaggcccctctcgcgtacgacgctatctgggccttggctttggcactgaataaaaccagcggtggtggcggaagatctggcgtgaggttggaggactttaattacaataaccaaactattactgatcagatttatcgcgcaatgaattccagctccttcgagggcgttagtggccacgtagtcttcgacgcttccgggtctcgcatggcttggacgctcattgagcagttgcagggaggttcatacaaaaaaataggatactacgacagtactaaagacgatcttagttggtccaagacggacaaatggataggcggatccccacccgccgatcagaccctggtcataaaaacctttagatttttatcacagaaattgtttattagtgtcagtgtgctctcttctctgggaattgtcctagccgttgtttgtctgtcctttaatatatataactcccacgtgcggtatatccagaatagtcagcccaacttgaacaatcttacggccgtaggttgtagtctggccttagcggcagtttttcccctcggacttgatggctatcatattgggcggaatcagttcccattcgtctgccaagctaggctctggctgctgggattgggtttttcgttaggctacggatcgatgtttaccaaaatttggtgggtgcatacagtctttacaaaaaaagaagaaaagaaagagtggagaaaaacgctggaaccttggaagttgtacgcgacagttggccttctcgttggcatggatgtactgacccttgcaatttggcaaatagtggaccctctgcaccgcactatcgaaactttcgccaaggaggaacctaaggaagatatcgacgtgtcaatcctcccacaactcgagcactgctctagccgcaaaatgaatacctggctggggatcttttacggatataaaggactgctgctgctgctcggaatattcttggcatacgaaacgaaatcagtgagtacagagaaaattaacgatcatcgggccgtgggaatggctatttacaatgttgccgttttatgcttgatcactgctcctgtgactatgatcctaagctcccagcaggatgctgcgtttgcttttgcctcccttgctattgtcttctcctcatacatcacgctggtcgttctattcgtgcccaagatgagacgactaattactaggggcgaatggcagagcgaggctcaggacacaatgaaaacaggctcatcgactaataataacgaggaagaaaaatccagactgttagaaaaagagaatcgcgaactcgaaaagatcattgccgagaaggaagagagggtatcagaactgaggcaccagctacaatcccgacaacagttacgctcaaggcgccatccccctaccccgcccgaaccgtcaggtggcctgccccgaggacctcccgagcccccagaccgcctttcctgtgatggctcccgcgtccacttgctgtacaagtag

SEQ ID NO: 14512 - RNA, 444 nt, synthetic construct
  misc_feature 1..444: note = source = /note="Description of Artificial Sequence: Synthetic coding sequence"
  source 1..444: mol_type = other RNA
atggccggtccatggacttttacactgctgtgtggccttctagcggccactctgatccaggccaccctatcgcctaccgccgttctgatcctgggacctaaggtgatcaaggaaaaactaacgcaagagctgaaagaccacaacgccacttcaattcttcaacagttaccacttctatctgccatgcgcgaaaaacccgccgggggaatacccgtcctgggatcgctcgttaacaccgttttgaagcatatcatatggttgaaagtgatcactgcaaatattcttcaactacaggtaaagccttccgctaacgaccaagagcttcttgttaaaattccccttgacatggtggctggattcaatacacccctggtgaagaccattgtagagtttcatatgactactgaggcccaggcaacgatccggatggatacttccgcttag

SEQ ID NO: 14513 - RNA, 948 nt, synthetic construct
  misc_feature 1..948: note = source = /note="Description of Artificial Sequence: Synthetic coding sequence"
  source 1..948: mol_type = other RNA
atgaaggtcctgctcctgacaggcctgggcgctctattcttcgcttattactgggacgacaactttgaccccgcatcgctgcagggagctcgcgtgctgctgactggggcgaacgccggcgttggagaagaactggcttaccattacgcacgactcggctcacatctcgttctgacagctcacacagaggccttgctccaaaaagtggtgggaaactgcagaaagcttggagcccctaaagtgttctatattgccgcagacatggccagccccgaggcacccgaaagcgtggtacagttcgcacttgacaaattgggcggcctggattacctggtgctgaaccatattggaggcgctcccgcaggtacacgcgcccggtcaccccaagctacgagatggctgatgcaggtgaactttgtgtcttatgtgcagttaactagtcgcgctctaccttcattaactgattctaagggaagccttgtggtggtgagctccctgctcggtagagttcccacatctttttccactccctattctgctgccaaattcgctttagacggatttttcggaagtctccgacgagaactggacgtgcaggacgtcaacgtcgccattacaatgtgtgtgctggggctccgagatagggcatctgctgcagaggccgtccgctcctctacatccagaccaagacagccagaacacaggggggtgcctttacagagtcagaccgcaatgtttttgccaccaacagtccctggcgcccgaaccctgaccgaaacgcccttgcgcgggtggccacagccaaaaatgaagagctctagacagaaatctaagaccgagaagaacgacggtcatctcgaacctgtaactgcatgggaggtgcaggtgccacgggtgcgacgcctttgccgtggattagctcgcccacacctgtttggtcatgattag

SEQ ID NO: 14514 - RNA, 285 nt, synthetic construct; identical to SEQ ID NO: 12875
  misc_feature 1..285: note = source = /note="Description of Artificial Sequence: Synthetic coding sequence"
  source 1..285: mol_type = other RNA

SEQ ID NO: 14515 - RNA, 783 nt, synthetic construct
  misc_feature 1..783: note = source = /note="Description of Artificial Sequence: Synthetic coding sequence"
  source 1..783: mol_type = other RNA
atggagaaatttaacacgatatcagtgagtaagtgcaataaggaaaccgttgcgatgaaggaaaaatgtaaattcggcatgacatctactataccgagcggccatgtctggaggaacacatggaaccctgtctcttgttctttagccacagtgaagatgaaggagtgcctgagaggaaaacttatatatctgatgggagactctactattcgccaatggatggaatactttaaggcctcaattaacaccctgaagtctgtcgatctgcatgagtccgggaaactgcagcatcagttagccgtggacctggatcgaaacattaacatacagtggcagaaatactgttatccccttattggaagcatgacttatagcgtgaaagagatggagtatctgaccagagcaattgatcgaacaggaggggaaaagaataccgtcatagtgatcagcctcggccagcactttcgccccttccccatcgacgtgtttataaggcgcgccctgaatgtacataaagcaattcagcacctgctattaagaagtcccgacacgatggttatcatcaagaccgagaatattcgcgaaatgtataacgatgcagaaagattttcggattttcatggctatatacagtacttaattattaaagacattttccaggatcttagcgtgtccatcattgatgcatgggatattactatcgcttatggaacaaataatgttcatccacctcaacacgtagtcgggaaccaaattaacattttattgaattatatctgctag

SEQ ID NO: 14516 - RNA, 1644 nt, synthetic construct
  misc_feature 1..1644: note = source = /note="Description of Artificial Sequence: Synthetic coding sequence"
  source 1..1644: mol_type = other RNA
atgagttccaataccatgcttcagaagacacttcttattctgattagtttttccgtggtaacatggatgatctttattatttcccaaaattttacaaaactatggagtgccctgaacctttctatctctgttcattattggaataatagcgcaaaatcccttttccccaagacatccttgatccccttaaagcctctgaccgagacggagctgagaattaaagagattatcgagaaattggaccagcaaatacctccccgcccctttactcacgttaacacaacaaccagtgccacccattccaccgctacaatcttgaaccctagagacacatattgtcgtggggaccagctggatatcctcctcgaggtgcgagaccacctgggacaacgaaaacagtatggcggagattttttaagggcaaggatgtcatctcccgcattgacagccggggcttctggcaaagtgatggacttcaataacggaacttacctggtatccttcactcttttttgggaaggacaggtctccctttcactactgctgattcacccttccgagggagccagcgcactctggcgggcccgaaatcaagggtacgataagattatcttcaaaggcaaatttgtgaacggtaccagccacgtgtttactgagtgtggactaactcttaattcaaatgctgaattatgcgaatatctggatgatagagaccaagaggccttttattgtatgaaaccccagcatatgccatgcgaggcattgacatatatgacgaccagaaatcgcgaagtctcatatcttaccgacaaagaaaactcattattccataggtcaaaggtaggagtcgaaatgatgaaggaccgcaagcatatcgatgtaacaaattgcaataagagagaaaagattgaagagacctgccaggtgggaatgaagccacccgtccccggagggtatacactgcagggtaaatggataactaccttctgtaaccaggtccaactggataccattaaaatcaacggctgcctcaaaggaaaactcatttacctgctaggtgactctacgctccgtcaatggatctactatttcccaaaagttgttaagactctgaaattttttgaccttcatgaaaccggcatttttaagaaacatctgctcctcgacgcagaacgacacacacagattcagtggaaaaaacactcatacccattcgttactttccagctgtattcactcattgatcacgactacattcccagagaaatagatcgactctccggagataaaaataccgccattgtaataaccttcggccagcacttcagaccgtttcctattgacatctttatccgccgcgccatcggcgtccagaaggccattgaacggctgttcttacgcagtcccgccactaaggtgatcatcaaaaccgagaacattagggaaatgcacatagaaacagaacgatttggggacttccacggctatattcattacctgattatgaaagacattttcaaagacctgaacgtggggataattgacgcatgggacatgacaatcgcatacgggactgatactatccatccaccagatcacgtcatcgggaatcagattaacatgtttctaaactacatttgctag

SEQ ID NO: 14517 - RNA, 399 nt, synthetic construct
  misc_feature 1..399: note = source = /note="Description of Artificial Sequence: Synthetic coding sequence"
  source 1..399: mol_type = other RNA
atgctgatgcttttcgtgtttggggtccttctccacgaggtttcactctccggacagaacgaagcccccccgaatactcacagcatccctggcgagcccctgtataattacgcttccataagattacccgaggagcatatcccattcttcctacataataaccggcatatcgctaccgtctgtcgcaaggattccctctgtccatataaaaaacacctcgaaaagcttaaatactgttggggttatgaaaagtcttgcaagcccgagtttcgttttggatacccagtctgttcatacgtggacatgggttggacagatactctagaatctgcagaggatatattttggaaacaggctgattttggctatgcacgagaaagactggaagagatgcattag

SEQ ID NO: 14518 - RNA, 861 nt, synthetic construct
  misc_feature 1..861: note = source = /note="Description of Artificial Sequence: Synthetic coding sequence"
  source 1..861: mol_type = other RNA
atgggttccgccttatttgtaaaaaaggagctgcaactgcaagccaacttcctgggaaatgttaagcggctttacgaagcggaggtctttagcacagattttagcaaccctagtatagcccaggcacgcataaattctcatgtcaagaaaaagacccaaggaaaggtcgtggacataattcagggactggatctactgactgccatggtgctcgtcaaccatatatttttcaaggccaaatgggagaaaccctttcatcccgaatacactcggaaaaatttcccctttctcgttggagagcaggttaccgtacacgtaccaatgatgcaccagaaagaacagttcgcatttggggtagataccgagttaaattgcttcgtgctgcaaatggactacaaaggcgatgcagttgccttttttgttctacctagcaaaggcaaaatgaggcagcttgaacaggcattgtcagcaagaaccttgaggaaatggtcccacagcctacagaagagatggattgaagtgttcatcccaagattctctatctctgcaagctacaacctggaaaccattctaccaaaaatggggattcaaaatgtctttgataaaaacgctgacttctccggcattgccaaacgcgattccttacaagtgtcaaaggcgactcataaagctgttctcgacgtaagcgaggaggggacagaggctaccgcagccactactactaagtttatcgttcgctcaaaggacggcccttcgtattttaccgtgtcatttaacagaacgttccttatgatgataaccaataaagctactgacggcattctgtttctggggaaagttgagaaccctaccaaaagttag

SEQ ID NO: 14519 - RNA, 60 nt, synthetic construct; identical to SEQ ID NO: 12880
  misc_feature 1..60: note = source = /note="Description of Artificial Sequence: Synthetic coding sequence"
  source 1..60: mol_type = other RNA

SEQ ID NO: 14520 - RNA, 1197 nt, synthetic construct
  misc_feature 1..1197: note = source = /note="Description of Artificial Sequence: Synthetic coding sequence"
  source 1..1197: mol_type = other RNA
atgaagtttcaggggcccctggcatgtctcctgctcgctctttgtctgggatcaggagaggcggggccactgcagagcggtgaggagagcacaggaacaaacatcggtgaggcactggggcacggtcttggagacgcattgtccgagggggtgggaaaggctattggtaaagaggccggaggagctgccggaagcaaagtgtcagaagcgttggggcaggggactagggaagcagtcgggacaggcgtgagacaagtccctggctttggggtggccgacgcactggggaatagggtgggcgaggctgcccatgccctagggaacaccggacacgagattggacggcaagcagaagacgtcatcagacacggagcagacgctgtaaggggtagctggcaaggggttccaggacacaatggggcatgggagacatctgggggacacgggattttcggttcccagggaggactgggcgggcaaggacaaggtaacccagggggccttggaacaccttgggttcacgggtacccaggtaattcagctggaagtttcggaatgaacccgcagggagctccttggggccagggaggaaacgggggaccaccaaatttcggaaccaatacccaaggggccgttgcgcagcccgggtacggtagtgtgcgcgcaagtaatcaaaacgaaggatgcaccaatcctccccccagcggatccggtggtggatctagcaattcaggcggtggtagtgggagccagagcggatcctcgggatctggcagtaacggggacaataacaatggatctagctccggggggtcctcaagtggctcgagctcagggggatcatccggcgggtcatctggtggttcttccggcaactccggcgggtcaaggggagacagtggctccgagagtagctggggtagctccacgggctctagctctggtaaccacggggggagtggtggaggaaacggccataagcctgggtgcgagaagcctggcaatgaagccagaggtagcggagagagtggcatacagggatttagaggacagggggtaagcagtaatatgcgtaattcagagacctcacccgggatgtttaattttgacactttttggaaaaacttcaaatctaagcttggtttcattaactgggatgcaattaacaaagatcagcgatcatctagaatcccctag

SEQ ID NO: 14521 - RNA, 81 nt, synthetic construct; identical to SEQ ID NO: 12882
  misc_feature 1..81: note = source = /note="Description of Artificial Sequence: Synthetic coding sequence"
  source 1..81: mol_type = other RNA

SEQ ID NO: 14522 - RNA, 696 nt, synthetic construct
  misc_feature 1..696: note = source = /note="Description of Artificial Sequence: Synthetic coding sequence"
  source 1..696: mol_type = other RNA
atggcacagctgttcctgcccttgctggccgccctcgtgttggctcaggcccccgccgcacttgcggacgtcctggaaggcgacagttcagggatctatagatgcgaggtacaacatggcattgacgactcatctgacgccgtggaagttaaagtgaagggagttgtgttcctctacagagaagggtccgcacgctacgcttttagtttcagcggagctcaggaagcctgtgctagaattggtgctcacatcgccacaccagaacaactttacgccgcttatcttggaggctatgagcagtgtgatgctggctggctgtcggatcagacggtgcgatatccaatccagaccccgagagaagcctgttatggcgatatggatggtttccctggcgtgaggaattacggtgtagtagatccagacgatttatacgacgtgtactgttatgctgaagatctgaacggtgaactgtttctgggcgacccccccgagaaacttactctggaagaggcccgagcctattgtcaagaacgaggggctgagattgcaactacgggacagctttacgccgcctgggatggaggactagaccattgtagccccggatggctcgcagacggctccgtaagataccccattgtcacccccagccaaagatgcggtggaggattgccaggcgtaaaaacgctgttttag

SEQ ID NO: 14523 - RNA, 600 nt, synthetic construct
  misc_feature 1..600: note = source = /note="Description of Artificial Sequence: Synthetic coding sequence"
  source 1..600: mol_type = other RNA
atggacgagctcctgccactcatacctgtgttggaacaatacaagactgacgccaagcttatcacacaatttaaggaagagattagaaatctgtcagctgtgctgaccgggattcaggaagagatcggcgcttacgactatgaggaactccaccagagggttctgtcactagagactagactgcgggactgcatgaaaaaactgacctgtggtaagcttatgaagataaccgggccagtgaccgttaagacatctggcacaagattcggcgcctggatgaccgatccccttgcctccgagaaaaataatcgtgtatggtacatggactcgtatactaataataaaattgtccgggaatacaaatcaatagcggatttcgtgagcggagcagaaagcaggacatataatttgccttttaaatgggccggcactaatcacgtcgtttacaatggcagcctgtatttcaacaaataccaatccaacattattattaaatacagcttcgatatgggacgggtcttggcccaacgttcgctggagtatgccggcttccacaacgtgactccaacgcatggagtagactctttgacttccacatag

SEQ ID NO: 14524 - RNA, 609 nt, synthetic construct
  misc_feature 1..609: note = source = /note="Description of Artificial Sequence: Synthetic coding sequence"
  source 1..609: mol_type = other RNA
atggccgacatgcagaacctcgtggaacgtttggaaagagcggtcgggcggctggaagccgtgtctcacacatctgacatgcatcgtggctatgccgattcccccagtaaggcaggtgccgcaccctacgtgcaggccttcgattcactcttggcgggccctgttgccgaatatttaaaaataagtaaggaaataggaggggatgtccaaaagcacgccgaaatggtacataccgggcttaaattggagagggcattgcttgtaaccgcctcccaatgtcaacagcccgctgaaaacaagctgagtgatctcctggcaccaatttctgagcaaatcaaggaggtgattacatttagggaaaaaaaccgcggatcaaaacttttcaaccatctttcagctgtctctgaatctatacaggcactgggctgggtggccatggcaccgaaaccaggaccctacgtcaaggagatgaacgatgcggcaatgttctatactaacagagtacttaaagagtacaaagatgtggacaaaaagcatgttgattgggttaaagcatatctatctatctggaccgagctgcaagcatacataaaagagttccacacctag

SEQ ID NO: 14525 - RNA, 2886 nt, synthetic construct
  misc_feature 1..2886: note = source = /note="Description of Artificial Sequence: Synthetic coding sequence"
  source 1..2886: mol_type = other RNA
atgttgttactgcttctgctagctccattattcctgagaccacccggggcagggggtgcccagactcccaacgctacatctgaaggttgccagattattcatcctccatgggaaggcggtattcgatacagagggctcacccgcgaccaggtgaaagctatcaacttcttacctgttgattatgagatagaatatgtttgccggggagagcgagaagtggtcggccccaaagtcaggaagtgtctcgctaatggctcctggaccgacatggacacccctagccggtgtgtgaggatatgtagtaaatcatacctgactctagagaacggtaaggtgttcttgactggtggggatctaccagccctggatggcgctagagtcgatttcagatgcgaccccgattttcacctcgtgggatccagtcgttctatttgctctcagggacagtggtctactccaaagccgcactgtcaggttaatcgcaccccacattccgagagacgagcggtttatatcggggcccttttccccatgtccggaggatggccgggaggccaggcttgccaaccagcagtagaaatggccctggaggatgtgaactcgaggcgagacattctcccagattacgaactgaaattgatccaccacgactctaaatgtgatcccgggcaggccaccaaatatctctatgaactcctgtacaatgacccgatcaaaataatactcatgcctgggtgcagcagcgtaagtacacttgttgccgaggcagccagaatgtggaatctcattgtcctctcgtatggctcatcttcgcccgcgctctctaataggcaaagatttccaactttttttaggactcacccctcagctaccctgcacaatcccacacgggtgaaactcttcgaaaaatggggctggaaaaaaatcgccacgatacagcagactacggaagttttcacatccactctagatgacctggaggaacgtgtcaaagaagccggcatcgagattacattcagacaatcattcttctctgacccagcagtcccagttaagaatctcaagcggcaagatgcgcgaatcattgtaggtttattctacgagacggaggcaagaaaagttttttgtgaggtgtataaagagaggttgttcggtaaaaagtacgtgtggttcctgattggctggtatgctgataactggtttaaaatctatgatccgtcaatcaattgcaccgttgacgagatgaccgaggctgtagagggccatataacgacagaaatcgtcatgctgaaccccgcaaacacacgtagtatttctaatatgactagtcaagaattcgtggaaaaactgacaaagcgacttaagagacatcctgaagagaccggaggatttcaagaggcacccctcgcatatgacgctatttgggcgctggccctcgctcttaacaagacgtccggcggcggaggccgttcaggagtgagactcgaggacttcaattataataatcaaaccattaccgatcagatttacagggctatgaacagttcaagtttcgagggagtttccggccatgtggttttcgatgccagtgggtcacggatggcatggacccttatcgagcagctgcagggcggctcttacaagaaaatcggctactacgactctaccaaagatgacctgtcctggtcaaaaacagacaaatggatcggagggagcccaccagcagatcagacccttgttatcaaaacattcaggttcctctcacagaagctcttcatctcagtcagtgtcctcagcagcctgggcatcgttctggcggtggtgtgtctgtcattcaacatctataactcacacgttcggtacattcagaactcccagcccaatcttaataatctcaccgcagttggatgctctctcgcgttggccgcagttttccctctcggactggacggatatcatataggaagaaatcaatttcccttcgtgtgtcaagctcgactttggctcctcgggctgggcttctctttgggctacggtagtatgttcactaagatttggtgggtccacaccgtgtttactaaaaaggaggagaaaaaagaatggcggaaaactctagaaccctggaagctgtacgcaactgttggattacttgtaggtatggacgtgttaacccttgctatatggcagatagtcgacccattacaccggaccattgagaccttcgcaaaagaagaacccaaagaagatattgatgtgagtatcttaccacagctagagcactgcagttcccgtaaaatgaatacatggttagggatcttttatggttacaaaggactgctactcttgctcggaatattccttgcctacgaaactaagtcagtgagcactgagaagatcaatgaccacagggcggtcggaatggcaatctataatgtcgccgtgctctgtcttatcacagctcctgtcacaatgatcctctccagtcaacaggacgctgcattcgcatttgccagtctggcgatcgttttctctagctatattacactcgtagtgcttttcgttccaaaaatgagacgcttaattacccgtggggagtggcagtccgaagctcaagatactatgaaaaccggctcttctactaataataatgaggaggaaaagagtagactgttggaaaaggaaaaccgggaacttgaaaagatcattgcagagaaagaagaaagagtgagcgaactaagacaccaactccagagtaggcagcagctaagaagcaggcggcaccccccgaccccccccgaaccgagcggcggcctgccacggggcccccccgaacccccagaccgactctcatgcgacggctccagggtgcatctattatataagtag

SEQ ID NO: 14526 - RNA, 351 nt, synthetic construct
  misc_feature 1..351: note = source = /note="Description of Artificial Sequence: Synthetic coding sequence"
  source 1..351: mol_type = other RNA
atggccgccggctctgcgcccatgcagcttcacctcagggccacaattagaatgaaagatggcttatgcgtgcccagaaaatggatctaccatcttactgaaggtagtaccgacctcagaacggaaggcagacccgatatgaagaccgaactattctccagctcttgccctggtggcattatgctgaacgagacagggcaaggctaccagaggtttctattgtacaacaggtcaccccacccacccgagaagtgtgttgaggaatttaagtctctgacatcatgtcttgattcaaaagcatttttgctcaccccacgcaaccaagaagcctgtgaactctctaacaactag

SEQ ID NO: 14527 - RNA, 2334 nt, synthetic construct
  misc_feature 1..2334: note = source = /note="Description of Artificial Sequence: Synthetic coding sequence"
  source 1..2334: mol_type = other RNA
atggctgctgccggactggtggctgtagccgccgcggccgagtactctggcacggtagcgagcggaggaaacctccccggggttcattgcgggcctagcagtggagcgggacctggctttggcccaggatcctggtcaagatccctagatcgagcccttgaagaagctgccgtcacaggcgtattaagtttaagtggcagaaaacttagagaattccccagaggcgctgccaatcacgatcttacagacaccacccgggctgacttgagcaggaaccgtctctcagagatcccaatcgaggcctgtcacttcgtttcccttgaaaacttgaacctctatcagaactgcatccgatatattcctgaagcaatcctcaatctccaagcgctgactttcctgaacatctcccgtaatcagctatctaccctgcccgtgcacctttgcaacctgcccctgaaagtcttaatagcctccaacaataaactggtctccctgcccgaagaaatcggacacttgcggcacctaatggagcttgatgtctcgtgcaatgaaatacagactattccatctcagattggaaacctcgaagcacttagggacctcaatgttcgtcggaaccaccttgtccacctgccggaggaactggctgagctaccattaatccgcctcgatttctcctgcaacaagattacaaccatccccgtgtgctatagaaacctgcgacaccttcaaaccattaccttggacaataatcctctgcagtccccacccgcccaaatttgtataaaggggaaagtgcatatctttaaatacctgaatatccaagcatgcaagatcgctccagaccttccagactatgacagacgccctctcggattcggctcctgccatgaagaactctattcctcccggccgtacggcgcactggacagcggatttaactcggttgattcaggagacaagagatggtccggtaacgagcccacagatgagtttagcgacctgccactgagggtggctgaaataactaaagaacaaagactccgcagagagtcacaatatcaggagaataggggtagtctagtcgtgactaatggtggagtggaacacgacctggaccagatagattacattgatagctgtaccgcagaagaagaagaggctgaagtgcggcaaccaaagggccccgaccccgactccctttcatcccagttcatggcttacatcgagcaacgtcgtatcagtcacgaagggtcaccagttaaacctgttgcgatccgcgagttccagaaaacagaagatatgagaagatacctccatcagaacagggtgccagctgaaccttcatccctgctctcactgagcgcgagtcataaccaactctcacacactgatcttgagctgcatcaaagaagggagcagttggtagaacgaaccaggcgggaggcccagttggctgccctacagtacgaagaagagaagatccgaacgaagcagattcagcgggatgccgtgctggatttcgtcaagcagaaagctagtcagtccccacagaaacaacatccattactcgacggagtggacggcgagtgtccttttccatcccgtcgcagccagcacactgacgattcagccctatgcatgtccctctcaggattgaaccaggtcggatgcgccgctaccctgccccactccagtgctttcactcctcttaagtccgatgatcgcccaaatgctttactgagttcacctgctacagagacagtacatcattcgcccgcttactccttccctgcagctatccaacgcaaccagccacagagacccgagtctttcctgttcagagccggagtaagggccgaaacaaataaaggtcacgcctcgccactcccaccctccgcagcaccgaccaccgattcaaccgattccataaccggccaaaattcaagacaacgagaggaggagctggaactcatcgatcagctaaggaaacacatcgagtatcgcctgaaagtaagccttccgtgtgaccttggcgcagctctcaccgacggggtggtgctatgtcatttagccaatcatgtgaggccaaggagtgtgccctccatccacgtaccaagccccgcagtgcctaaactcaccatggccaaatgtcgaagaaacgttgagaattttctagaagcctgccgtaaaatcggtgtaccccaagagcagctctgtcttccattgcacatccttgaagaaaaaggcctgtcacaggtggctgtcactgttcaggccctactggagctggccccccccaaacaacagcagcatcagttgagtgccgtctag

SEQ ID NO: 14528 - RNA, 834 nt, synthetic construct
  misc_feature 1..834: note = source = /note="Description of Artificial Sequence: Synthetic coding sequence"
  source 1..834: mol_type = other RNA
atgcttcaccctgagacctcgcccggcaggggtcatttgctcgccgtgctgctggccctccttgggacaacctgggctgaggtatggcccccacaactacaggagcaggctcccatggcaggagcactcaataggaaagagtcctttcttcttctgagtttacataaccgtttaaggtcctgggtccagcccccggctgccgatatgcgaagacttttagtttgggctacctcttcccagctcgggtgtggccgccacttgtgtagcgccggacaaacagccatcgaggccttcgtttgtgcctattcacccggaggaaactgggaggttaacggtaaaacaatcataccttacaaaaaaggagcatggtgttctttgtgtactgcgtcagtgtctgggtgttttaaggcctgggaccacgcgggcgggctatgtgaggtcccaagaaatccatgtcgtatgtcctgtcagaatcatggccgtctgaatatttcaacatgccattgtcattgccctcccggttacacagggcgatattgtcagggtcacttgccaaacagcaatatgcctcattccgccatggggactaagccaaaaactccgggcgtccctgctattggtagtcttgtgaggtgttccctgcagtgcgtccacggtcgatttagggaagaagagtgttcttgtgtttgcgatatcggatacggcggggcacagtgtgctagcgaatcttgtcccagagcccccaaagagcccgcccccctgaaaactcctctacagtggggtatctcttcacaggagcccgcagtttgcctgtcctttcaactgatacagtag

SEQ ID NO: 14529 - RNA, 456 nt, synthetic construct
  misc_feature 1..456: note = source = /note="Description of Artificial Sequence: Synthetic coding sequence"
  source 1..456: mol_type = other RNA
atgtccgacctgttacttctcggtttgataggaggccttacactgctcctgctactaacacttctcgcatttgcaggatactccgggctattggcgggcgtggaggtgtctgcagggtccccacctattcggaatgtgacggtcgcctataaattccatatggggctgtacggtgagactggtaggttgttcacagagtcatgctcaatttcccctaagctgagatctattgccgtgtactatgacaacccacacatggtcccccctgacaaatgccgctgtgcagttggaagtattctgtctgaaggtgaagaatctccctcacctgaacttatcgatctgtatcaaaaattcggattcaaagtttttagttttccagctccctcacatgtggtgacagctacgtttccctatacaactattctctcgatctggttggcaacccggcgggtttag

SEQ ID NO: 14530 - RNA, 390 nt, synthetic construct
  misc_feature 1..390: note = source = /note="Description of Artificial Sequence: Synthetic coding sequence"
  source 1..390: mol_type = other RNA
atggctgccggaagcgcccctatgcagctccacctgagagctaccataagaatgaaagatggcttatgtgtccccagaaagtggatataccacttgacagagggctccactgacctgagaactgaaggacggccagacatgaagaccgaactattcagtagctcatgtccaggcggtatcatgctaaacgaaaccggccaggggtaccagagatttctgctttacaatcgaagcccccaccctccagagaagtgcgttgaagagtttaagagcctcacctcctgtctagattccaaggcttttttattgacgccacgaaaccaaggtaaaggactcaagtcacacaagactggactggggctaacaaagtcaagcggggttacgggatag

SEQ ID NO: 14531 - RNA, 390 nt, synthetic construct
  misc_feature 1..390: note = source = /note="Description of Artificial Sequence: Synthetic coding sequence"
  source 1..390: mol_type = other RNA
atggccgcggggagcgcacctatgcagctacatctgagagcaacaatccgcatgaaagatgggctctgtgtcccaaggaaatggatttatcacctgaccgagggtagtactgatctccgtacagagggacgtcctgatatgaaaaccgaattattttctagctcatgccctggcggcattatgcttaacgagacaggccagggctatcaaaggttcttattgtataaccgcagcccccaccccccagaaaagtgtgtcgaagaatttaagtcgcttacgtcctgtctcgattctaaggctttcttattgacaccaaggaaccaaggtaaagggctgaaaagtcataagaccggcctcggactgacaaaatcaagcggcgtgactggatag

SEQ ID NO: 14532 - RNA, 891 nt, synthetic construct
  misc_feature 1..891: note = source = /note="Description of Artificial Sequence: Synthetic coding sequence"
  source 1..891: mol_type = other RNA
atggaagccctccttctgggagccggtctcttactgggcgcctacgtactggtctactacaacctggtaaaagctcctccttgtggcggcatggggaacctgcgggggcggacagccgtcgtaactggtatctctagctgtggacgtacccgggaagcctttaatctcctcctccgtgtaaaccatattggacctttccttctgacgcatctactgttgccatgtcttaaagcttgtgcaccatctcgcgtggtcgtcgtggctagcgcagctcactgtaggggacgcctggacttcaagaggttggataggcctgtcgtcggctggaggcaagagcttcgggcatacgccgataccaagctagctaatgtattatttgccagggaattagccaatcagcttgaagccactggcgtcacctgttatgccgcccatcctggacctgttaattccgagctgtttttgagacatgttcccggctggttaagacctctcctcaggccactggcctggctcgtactgagggcaccgcgcggcggcgctcagacccccctatattgcgctctgcaggaaggcattgagcctcttagtggtcggtattttgcaaactgtcatgttgaagaagtcccgcctgctgctcgagacgacagggctgcacatcgattatgggaagcaagcaagcggctcgcaggcctaggcccaggtgaagatgccgaaccagacgaggacccccagagcgaagactcagaggctccctcctccctgagcaccccacacccagaagagcccactgtctctcaaccgtacccctccccacaaagtagtcctgacctgtctaagatgactcacagaatccaggcaaaagtggaaccggaaatccaactctcctag

SEQ ID NO: 14533 - RNA, 567 nt, synthetic construct
  misc_feature 1..567: note = source = /note="Description of Artificial Sequence: Synthetic coding sequence"
  source 1..567: mol_type = other RNA
atgttccatcagatatgggccgcactgttatatttctatggaatcatactcaactcaatctaccagtgtcccgaacacagtcaacttacaaccctcggcgtcgatggtaaagagttccctgaagtgcatctaggtcagtggtacttcatcgctggagccgcgccaacaaaggaagaacttgccacgttcgaccctgtggacaacattgtctttaacatggctgctggcagcgctccaatgcagcttcacctgagagcaacgatccggatgaaagatggcctctgcgtcccccggaagtggatttaccatctcacagagggctcaaccgacttgcggaccgagggacgacctgatatgaagaccgaacttttttctagctcctgccctgggggcataatgctgaatgaaacaggccagggataccagcgcttcctgctatataatagatcccctcatcctcctgagaagtgtgtcgaagaattcaagtcactgacctcttgcttagattcaaaggccttcttactgactccgcgcaatcaggaagcttgcgaactctccaacaactag

SEQ ID NO: 14534 - RNA, 978 nt, synthetic construct
  misc_feature 1..978: note = source = /note="Description of Artificial Sequence: Synthetic coding sequence"
  source 1..978: mol_type = other RNA
atgcagggtagggtagccggatcatgtgcccctctcggcttgctcctggtgtgtttacatttgccaggactattcgctagaagcattggagtagttgaagaaaaagttagccaaaatctgggcacaaatctgccacaactgggccagccgtcatcaaccggaccgagtaacagtgagcatccccagcccgccttagatccccgctcaaacgacctggcaagagttcctctcaaactctctgtccccgctagtgacggctttccccctgccggaggcagcgcggtacaacgctggccgcccagctgggggctccctgcgatggactcttggcctccggaggacccttggcagatgatggcagcagccgccgaggatcggctgggagaggctcttcccgaagaactctcctatctgtctagtgccgcagcgcttgcccccggtagcggacccctccccggcgaaagttcccctgatgcaaccggactctccccaaaagcttctctgctgcaccaggactcagaatcacgtaggcttcctcgaagtaactcattgggcgctggaggaaaaatcttgtcacagaggccaccatggtcattaattcacagggtgctgccggatcatccatggggaacgctaaatccttcagtcagctggggaggagggggaccgggcaccggctggggaacgagacccatgcctcatcccgaggggatatgggggattaacaaccaacctccaggaacctcgtggggaaacattaacagatacccaggcggttcgtggggcaacatcaaccggtacccaggcggcagctggggcaatattaacagatatcctggcgggtcctggggaaacatacatttatatcccggcattaataatccctttccacctggcgtacttcgacctccaggtagcagttggaatatacccgcaggatttcccaacccacccagccccagactccagtggggatag

SEQ ID NO: 14535 - RNA, 2631 nt, synthetic construct
  misc_feature 1..2631: note = source = /note="Description of Artificial Sequence: Synthetic coding sequence"
  source 1..2631: mol_type = other RNA
atggggcccgaagcactatcttcgctcctcctgcttctgctggtagcctccggtgacgcggatatgaaggggcactttgaccctgccaagtgtcgttacgctctgggtatgcaagaccgcactatccctgactcagacattagcgcttcatctagttggtcagattccacggctgctcggcattcccgtctcgaatccagtgatggcgacggcgcctggtgtccagccggctcagtgttccccaaggaagaggaatatctgcaggtggacctccaaaggctacatctggttgctctggtgggaactcagggacgtcatgcgggggggctcgggaaggaattttctagaagctatagactcaggtactctcgtgatggcagacgctggatgggatggaaagatcgctgggggcaagaagttatatctggtaatgaagatcccgaaggcgttgtgttgaaagatttaggcccaccaatggtggctcgactggtgcgtttttaccctcgcgccgatcgggttatgtccgtctgtttacgagtggaactgtatggctgcctgtggagagatggcttgctgtcatacactgctccagtgggacaaacaatgtatctgagtgaagcggtgtatctcaatgattcaacatacgatgggcatacagtagggggcttacagtacggtggcctgggacagctggctgacggagtagtaggattggacgatttcagaaaaagtcaggaactgagagtgtggcctggctacgactatgtgggatggtctaaccatagcttcagttctgggtatgtggagatggaatttgagtttgatcgtctgagagcatttcaggcaatgcaggttcactgtaacaatatgcataccctgggagcacgcctccccggcggtgttgagtgtcgattcagaagaggacccgccatggcatgggaaggcgaacccatgcgacacaatctgggcggcaatttgggagacccaagggccagagcagtatctgtccctcttggaggccgggttgctaggttccttcaatgtcgcttcctattcgctgggccatggctcctgtttagcgagatctcgtttatctccgatgtggtgaacaacagtagcccagctctaggcggtaccttcccccccgctccttggtggcctccgggccccccccccacaaacttctcatccttagaactggagccacgcggccagcaacccgtggccaaggctgagggctctcctactgccatccttattggatgtctggtcgcaattattctgctgttgcttctcatcatcgcccttatgctgtggagactacattggcgcagactgttgtcaaaagccgagagacgcgttctagaggaagaattaactgtacatttaagcgtgcctggagacaccattctgattaacaacagacccggtcccagagagccaccaccctaccaggaaccaagaccaaggggcaatcccccccactctgctccatgtgtccctaacggatccgcctattccggggattacatggaaccagagaagcccggtgccccactgctgccgccccccccccagaactcagttccccattacgcagaagccgatatcgttaccctccagggagtgactgggggaaatacatacgcagtgccggctctgcctccgggcgcagtaggggacggcccacccagagtagacttccctcggtctcgtttgagattcaaagaaaaactcggtgaaggacaattcggcgaagtgcatctctgtgaagtagacagccctcaagatcttgtttctcttgactttccactgaatgttcgtaagggccatcccctcctggttgccgtgaagattcttagacctgacgccaccaagaacgcacgtaatgattttttgaaagaagtgaaaatcatgagcagactgaaggaccccaatatcatccggctgctgggggtctgtgtgcaggatgaccccctctgtatgattactgactacatggagaacggcgaccttaatcagtttttgtcagcccaccaactcgaggataaagcagccgaaggtgccccaggggatggacaggccgctcaaggtcccaccatctcctacccaatgcttctgcatgtggccgcccaaatagcttctgggatgagatacctggctactttgaattttgtgcatagggacctcgcaactagaaattgcctggtcggtgaaaatttcactattaagattgctgatttcggtatgagcagaaacttatacgccggtgattactatagagtacagggacgtgcggttctgccaattaggtggatggcgtgggaatgtatcctcatgggaaagtttaccacagcttccgacgtgtgggcgttcggtgttactctctgggaagtcctgatgctatgtagagcccagccctttggacaactcacagatgaacaggttatcgaaaatgctggcgagttcttccgcgatcagggtcgtcaggtgtatttaagccgaccccccgcatgcccccagggactttacgagttgatgctaaggtgttggtctagagaatccgaacagcgcccacccttttcccagttacatcgctttctcgccgaggatgctcttaacactgtgtag

SEQ ID NO: 14536 - RNA, 1482 nt, synthetic construct
  misc_feature 1..1482: note = source = /note="Description of Artificial Sequence: Synthetic coding sequence"
  source 1..1482: mol_type = other RNA
atggccctgctggccggtggactgtccagaggattggggtcccatccagctgccgccggccgtgatgcagttgttttcgtgtggctgctgctctctacttggtgcaccgcccccgctcgggctatccaggtcactgtttctaatccatatcacgtcgttatactctttcaacctgtgacacttccctgtacttatcagatgacctcaaccccaacccagcccatcgtgatttggaagtacaagtctttctgccgcgataggatcgccgatgccttctcgccagcctccgtggataaccagcttaacgcacagctcgcagccggtaatccaggctacaacccctatgtggagtgccaagacagcgtcaggacagtcagagtcgttgcaactaagcagggtaatgccgtaactctgggagactattatcagggccgccggatcactatcacaggcatgtacgcagccggtaaggccgcaacaagcggggtgccctccatttacgcacccagtacgtatgcccacctctccccagccaaaacccccccccctccagccatgatccctatgggacctgcatacaacggttatcctggaggttaccccggcgatgtagatcgctcgagtagcgctggtggtcaaggctcatatgtacctctgctgcgggacacagactcgagcgtggcctccgaagtacgcagcggataccgaatacaagctagtcagcaagatgattctatgcgcgtgttatactatatggaaaaagaactggccaacttcgatccatcaagacccggccccccatccggacgcgtcgaacgcgctatgagcgaggtgacttcactgcacgaggacgattggagatccagaccaagccgaggacccgctctgaccccaatccgtgacgaggaatggggaggtcacagtcctagaagcccacggggctgggaccaggaaccagcccgagaacaggctggaggagggtggcgcgccagacgcccccgcgctagatctgtagatgccctggatgatcttaccccgcccagtacagctgagtctggatccagatcgccgacctccaatggaggccggtctcgtgcctatatgccaccacgctcacggtcaagggatgacctgtacgatcaagacgatagcagagattttcctaggtctcgcgatcctcactacgatgatttccgctcccgtgagcgacccccggcagacccccgctcccaccatcaccggactagggatcctagagataacggcagcagatcaggagacttaccatatgatggaaggctgctcgaggaagcagttaggaaaaagggatcagaagagcgtcgaaggccccacaaagaggaggaggaagaagcgtactatccacctgccccaccaccatacagcgagacagatagccaggcctcaagagaaagaaggctcaagaagaaccttgcactgagtcgggagtccttagtggtgtag

SEQ ID NO: 14537 - RNA, 1788 nt, synthetic construct
  misc_feature 1..1788: note = source = /note="Description of Artificial Sequence: Synthetic coding sequence"
  source 1..1788: mol_type = other RNA
atggactttcttttggccctggttctcgtcagttctctttatttacaggctgccgcagaattcgatgggagatggcccagacagattgtgtcctccataggattgtgtcgatatgggggcagaattgattgttgctgggggtgggctcgccagagctgggggcagtgccagccagtgtgccagccccgctgcaagcatggagaatgtattggaccgaataaatgtaaatgccacccagggtatgcaggcaaaacgtgcaaccaggatgaacatatcccagcacctctcgaccagggaagcgagcaacccctgttccagccactggatcaccaagctacctctttgccctctcgggaccttaatgagtgcggattgaaacctcgaccctgtaaacacaggtgtatgaatacatacggctcctataaatgctattgcctgaacggctatatgttaatgcccgacggcagttgttcttcagctttgacatgcagtatggccaattgccagtacggctgcgacgtggtcaagggacagatacgttgccaatgtccatccccaggcttgcagctagcccccgacgggagaacttgtgtggatgtggatgaatgcgctacggggagagcctcatgcccccgctttaggcagtgtgtaaatacgtttggatcatatatatgtaaatgccacaaaggattcgatctgatgtacattggaggcaaataccagtgtcatgatatagacgagtgttcgctgggacagtaccagtgttcaagtttcgctcgatgttacaatataaggggcagctataagtgcaaatgcaaagagggatatcagggagacggtttgacctgtgtttacatcccaaaagttatgattgaaccatctggtcctattcacgtgccgaagggaaacggaaccatcttaaaaggggatactggtaacaataattggattccagacgttggcagcacatggtggccacccaaaaccccctatattcctccaatcatcacaaatcggcctacatctaaacccaccactcgccctacaccaaaaccaacacctattccaacgccacctcctcccccacctttgccgacagaactccggaccccactgccccccaccaccccagaaagacctactactgggttaaccacaattgctccagctgcctcaactccccctggcgggatcacagtcgacaatagggtccagactgatccacagaaaccccgcggtgacgtgtttataccacgccagccctccaatgatctgtttgagatattcgagatagagcgtggcgtcagtgccgacgatgaagccaaggatgatccgggcgtgctggtgcactcatgcaactttgaccacggcctctgcggatggattagggagaaagacaacgacctgcattgggagccaatccgagacccagccggcggccaataccttaccgtgagcgcagccaaagccccaggtggaaaagctgccagactggtgcttccccttggtagattaatgcactccggcgacctgtgcctctccttccgacacaaggtgacaggactgcacagcggcacactccaggtatttgtaagaaaacatggggctcacggggcggcgctatggggtagaaatggcggacacgggtggcgccagactcagataactctgcggggggctgacattaaatcggtcgtgttcaaaggcgaaaagaggcgcggccacacaggggagattgggctggatgacgtatccttaaagaagggtcactgctcggaagaacggtag

SEQ ID NO: 14538 - RNA, 210 nt, synthetic construct; identical to SEQ ID NO: 12899
  misc_feature 1..210: note = source = /note="Description of Artificial Sequence: Synthetic coding sequence"
  source 1..210: mol_type = other RNA

SEQ ID NO: 14539 - RNA, 483 nt, synthetic construct
  misc_feature 1..483: note = source = /note="Description of Artificial Sequence: Synthetic coding sequence"
  source 1..483: mol_type = other RNA
atggccagggattatgaccacctcttcaagttgctcatcatcggggacagtggagttggaaaatcctcgctgctcttaagattcgcagacaacaccttttcagggagctacatcacaactatcggtgttgattttaagattagaacggtagagatcaatggcgaaaaagttaaattacagatctgggataccgccggccaggagcgattcagaacaattacatcaacggccgagaccgcactgagatccctgccccaaccagaagctcacggcgggtcttcaggggatagcctttcctttgtgcccctgttcaaggaattctccccctgcttctgcattggtcgatgtcacagacatttcctacccagaccccccagagtaccgagacgctgttggacttcacccccttttcccacaggcgccccttctagcccagcaaaagcccctggacccggcgaggacgctgctcgtcgcgctgactag

SEQ ID NO: 14540 - RNA, 360 nt, synthetic construct
  misc_feature 1..360: note = source = /note="Description of Artificial Sequence: Synthetic coding sequence"
  source 1..360: mol_type = other RNA
atgaacaagattttgtctagcacagtttgcttcgggctcctcacgctactgtccgtattgtcgtttctgcagtctgtacatggtagaccctatctgacgcagggaaatgaaatcttccccgataagaaatacactaatcgcgaagaactgttgctagccctgcttaataagaattttgactttcaaagaccattcaacacagacctcgctctgccaaataaattggaagaactgaaccaattggagaaactcaaagaacaactcgtggaagagaaggattcagagacttcatatgccgtggacggcttgttttcatcccacccgtctaagagagcatgtttctggaagtattgtgtgtag

SEQ ID NO: 14541 - RNA, 2514 nt, synthetic construct
  misc_feature 1..2514: note = source = /note="Description of Artificial Sequence: Synthetic coding sequence"
  source 1..2514: mol_type = other RNA
atgtttaagtgttggtcagtggtcctcgtgctgggctttattttcctcgagagtgagggtcgcccaaccaaggaagggggatatggactgaagagttaccagcccttgatgcggcttaggcacaaggaaaaaaatcaagaaagtagccgagtgaagggctttatgatccaggatggcccatttggttcatgtgagaataaatattgtggcttgggtaggcattgcgttacatccagagaaacaggacaggctgaatgcgcttgcatggacctctgtaaacgacattacaagcccgtatgcggaagcgatggcgaattctacgaaaatcactgtgaggtacacagggcagcatgtctaaaaaaacagaaaattacaatcgtacacaacgaagactgcttctttaagggagacaaatgcaagaccacagagtacagtaagatgaaaaacatgttattagatcttcaaaatcaaaagtatatcatgcaggagaacgagaaccctaatggcgacgacatttcccggaaaaaactgttggtcgaccagatgttcaagtacttcgacgcagactccaatgggcttgtggacataaatgagctgacccaggtcatcaaacaagaggaactgggaaaagatctgtttgactgtacactttacgtattgttaaaatatgacgactttaatgcggacaaacatctcgcactggaagaattttacagggcctttcaggttatccagttgagtctacctgaagatcagaaattatcaatcacggccgccacagttggccagtctgccgtgctgtcatgcgctatccaaggaactctgagaccccctatcatctggaaaagaaacaatattatcctaaataatctggaccttgaggacattaatgatttcggagatgatggatctctctacattaccaaagtcacaaccactcacgtcggcaattatacatgttacgctgacggctacgagcaagtctatcaaactcatatctttcaagtcaacgtgcctcccgtcatccgcgtgtatcccgaaagtcaggccagagagcccggagttaccgctagtctacgttgccacgctgagggcatcccaaaaccacagctgggttggctgaaaaatggcatagacattactcccaaattgtcaaaacagctgacactgcaggctaacggatccgaagtacacattagcaatgtgaggtacgaagacaccggggcttatacctgtattgctaaaaacgaggcgggcgttgacgaagacatctccagtctgtttgtagaggatagcgcacgtaagacacggcttggtattgggaatatgttctatgtcttttatgaagatggtatcaaagtgatccagccaatcgaatgtgagtttcaaagacacattaagcctagtgaaaaactgctcggattccaggacgaagtatgtccaaaggcagagggcgacgaagtacagcgctgcgtgtgggcgagcgccgtaaacgtcaaagacaaatttatttacgtcgctcagcccacgctcgacagagtgcttatcgtggacgtgcaatctcagaaagtggtccaagcagtttctactgaccctgttccagttaaattacattacgataaatcgcatgatcaggtttgggtgctgagttggggcacactggagaaaaccagccccacgctccaggtcatcaccctagcctcaggcaacgttcctcaccacactatacatacccagccagtcggcaaacaattcgaccgagttgacgatttttttataccgactactacccttatcataactcacatgagatttggattcatcctgcacaaagacgaggccgcactgcagaaaattgaccttgaaactatgtcctacattaaaacgatcaacctgaaagactacaaatgcgtccctcagagtctcgcgtacactcatttaggcggctactactttatcggatgcaaacctgacagtactggcgccgtgtccccccaggtgatggtggacggcgtgactgacagtgtgatcggctttaacagtgacgtgaccggtacaccctatgtctcccccgacggacactatcttgtaagtattaacgatgtcaaaggactggttcgcgtacagtatataaccattcgaggggagatccaagaggcattcgatatttacactaaccttcacatttccgacctcgcatttcagccctcttttaccgaagcacatcagtacaacatttacgggtcgtcaagtactcagaccgatgttttgtttgttgagctgtcaagcggcaaggttaagatgattaaaagcctgaaggaacccctcaaagcagaagaatggccttggaacagaaagaaccgacaaatccaggactcaggactgttcgggcaatatcttatgacaccaagcaaagactctctgtttatacttgacggccgtttaaataaattgaattgtgaaatcactgaagtggaaaagggaaacactgtgatctgggtgggcgacgcgtag

SEQ ID NO: 14542 - RNA, 648 nt, synthetic construct
  misc_feature 1..648: note = source = /note="Description of Artificial Sequence: Synthetic coding sequence"
  source 1..648: mol_type = other RNA
atggccgacatgcaaaatcttgtggaacgcttagagcgagccgtcggacgcctggaagctgtctcacatacttcggatatgcacagaggttacgcagattctccatctaaagctggggccgccccctatgtacaggcctttgactcacttctcgcaggtcctgttgccgagtacctgaaaattagcaaggagatcggcggcgacgttcagaagcacgcagaaatggtgcacacagggcttaaattggagcgcgccctgctggtaaccgcttcccaatgtcaacagcccgcagagaataagctctccgatttgcttgctccaatctcagaacaaataaaggaagtaataacattcagggagaaaaatagaggttctaaactgttcaatcacttaagtgctgtgagcgaatccatccaagcacttgggtgggtggctatggctccaaaacccggtccttacgttaaggaaatgaatgacgctgccatgttttacaccaaccgcgtattaaaagaatataaagatgtagataagaagcatgtggattgggtcaaggcttacctgtctatttggaccgaacttcaggcctatattaaagagttccataccaccggcctcgcttggagcaaaaccggccccgtcgctaagtag

SEQ ID NO: 14543 - RNA, 3837 nt, synthetic construct
  misc_feature 1..3837: note = source = /note="Description of Artificial Sequence: Synthetic coding sequence"
  source 1..3837: mol_type = other RNA
atgcgtctgttactgctagtgccactcctactggctcctgcacctggatcctcagcccccaaagtgcgcagacaatcagatacttggggcccatggtcccagtggtcgccttgttccaggacctgtggcggtggagtgagttttcgcgagagaccatgttacagccagcgtcgcgacggtggaagttcctgtgtgggcccggcacgatcacatcgctcctgtcgtactgaatcttgccctgatggcgctagagactttagagccgagcaatgcgccgaatttgacggcgcggaattccagggacgtaggtacaggtggctcccttattactccgctccaaacaagtgtgaactgaactgcattcctaagggcgaaaacttttactacaagcacagagaagctgtcgtcgacggtaccccctgcgaacctgggaaaagagacgtgtgtgttgatggctcgtgtcgggtagtcgggtgtgaccatgagctcgacagcagtaagcaagaagataagtgcctaagatgcggaggagatggtacaacttgctatcccgtggcgggtacgtttgacgctaacgatttgtcacgaggctataatcaaatcctgattgtaccaatgggagcaacatccatcctgatcgatgaagctgccgcatccagaaacttccttgccgtgaagaatgtgagaggagaatattatctaaacggtcactggacgattgaagccgcacgggcgctccctgcagctagcactatcttacactatgagcgcggtgccgagggcgacttggcaccagaaagattgcacgctcgaggcccaacaagcgaaccactagtgattgagctcatctcccaggagccaaatcccggcgtgcattacgagtatcatttgcccttgaggcgaccaagccctggcttttcttggtcccacggcagttggtcagactgctcggcagaatgtgggggcggacaccagtcccgactcgtcttctgtaccattgatcatgaagcctaccctgaccatatgtgtcagcgtcagcctcgccccgccgatagaaggagctgtaaccttcatccctgccctgagacaaaaagatggaaggccggaccctgggctccctgttctgcctcatgtggaggcggcagccagagcagatcagtctactgcatttccagtgatggtgccggcattcaggaagctgtggaggaagccgaatgcgccgggctgcctgggaagccacctgcaatccaggcctgcaacctccaacgatgtgctgcttggagtccggaaccctggggagaatgttctgtgtcttgtggggtgggagtgcgtaaaagatctgtgacatgtagaggcgaaagaggttctcttctgcacactgccgcctgcagcctggaagatcgcccccccctcacggaaccttgtgtccatgaagattgtccattgctgtccgatcaggcttggcacgtgggtacttggggtttatgtagtaaaagctgtagttctggcacacgtaggagacaggtgatctgcgccattggccctccatcacattgtggaagtctacaacattccaaacctgtagatgttgaaccatgtaatacccagccttgtcatctgccccaggaagttccctccatgcaggacgttcacacgccagcttctaatccctggatgcctctgggcccacaggaatctccggcttccgactcccgtggccagtggtgggcggcgcaggagcatcccagcgctcgaggcgatcatagaggggagagaggcgacccgagaggggatcaaggaacccatctgtccgcactcggacccgcaccaagcctccagcaaccaccgtatcagcagcccctaaggtccggttccggaccccatgattgccgacattccccacatggttgctgcccagatggccataccgctagtctaggcccacaatggcagggttgcccgggcgcaccctgtcagcagagtaggtacgggtgttgtcctgatcgagtgtcagtggctgaaggaccacatcacgccggatgcaccaaaagttatggaggagattctacggggggcatgcctcgctctcgtgctgttgcctccactgtgcacaatacacatcaaccccaagcccagcagaatgagcccagcgaatgtagaggcagccagtttggatgttgctacgataatgtggccaccgctgccggaccacttggagagggatgcgtgggccaaccttcgcacgcctaccccgttcggtgtcttctgccctctgctcatggtagttgtgccgattgggccgcccgctggtacttcgtggcctccgtgggacagtgtaacaggttttggtatgggggctgccatggtaacgccaacaactttgcttcagaacaagagtgcatgtcaagttgtcagggttcactccatggccccaggagaccccaacccggtgctagtggtaggagtacccacacagacgggggaggcagctcaccagccggagagcaggagccgtctcagcatcgaaccggtgcagctgtccaacgaaagccatggccaagcggaggattatggaggcaggatcagcagccaggcccaggtgaggcacctcacacccaggcatttggagagtggccctggggtcaggaacttggctcgagagcgcccggcttaggcggagacgcaggcagccccgccccccccttccattcaagcagttatagaatcagtcttgccggcgttgagccgagtctcgtacaagcagcattgggccagctcgtcaggctaagctgctcagatgacaccgctcccgagtcccaagccgcttggcagaaagatggtcagccaatatcatccgatcggcatcggctgcaattcgacggttcgctaatcattcaccccctgcaagcagaagacgctggaacatactcctgcggcagcacaagaccaggtagagacagccaaaaaatacagctgcgaattatcggaggcgacatggccgttctctctgaagctgaactgtcccgttttccccagcctcgagacccggcccaggacttcggtcaggcaggcgctgcaggcccgttaggggcaattccttctagccatccccaacctgcaaaccgacttcgcttagatcagaaccaacctcgggtagtggatgccagtcccgggcagcgcattcggatgacctgccgcgcagaaggcttcccaccaccagctatagagtggcagagagatggccaacctgtcagcagcccacgccaccaattgcagcccgacggatcacttgtgatctccagagtggccgtggaggacggagggttctatacttgtgtggcctttaatgggcaagaccgtgatcaacgctgggtgcaattacgtgtgctgggagagctcactatctctgggctgccacccacggtgacggtaccggagggagatacggcgagattattgtgcgtggtggccggcgaaagtgtcaatatccgatggagtcgcaatggtttacctgttcaagcagacgggcatcgtgtgcaccagtccccagatggaactttgctcatttacaatttgcgggcgcgcgacgagggatcttacacctgttcagcataccagggaagtcaagcagtctcacgttcgacagaagtgaaagtggtgtcccccgctcctaccgcccagccgcgcgaccccggccgtgattgtgtggatcaacctgagttggcaaattgcgacctgatcctccaggctcagctttgcggcaatgaatactattcttccttctgctgtgcttcctgttcacgttttcaacctcatgcccagcccatctggcagtag

SEQ ID NO: 14544 - RNA, 546 nt, synthetic construct
  misc_feature 1..546: note = source = /note="Description of Artificial Sequence: Synthetic coding sequence"
  source 1..546: mol_type = other RNA
tgaaagggacatgcctcacccttacccccttctgctgcaccaaccaccgattcaactgattctatcaccggccaaaatagtagacagagagaggaagaactcgagctcattgaccagttgcgcaaacatatagagtatagacttaaggtcagtcttccttgcgacctcggagctgcccttacagatggagtcgtactgtgtcacctagcgaaccacgtcaggccacgctccgtcccctctatccacgtgcccagtcccgctgttccaaaacttacaatggctaagtgtagacgcaatgtggaaaacttcctggaagcctgtcgcaaaattggcgtgcctcaggacaacctgtgttccccctccgatatactccaactaaatctctccgtgaagcgcacagttgaaacactgctgtccctgggagctcattctgaagaaagttcctttgtctgcctttccctgcagctgttaggtttcgtagcattttactgcacagtgatgcttacgctatgcgtgctgtactactggttgtttcccgccagatag

SEQ ID NO: 14545 - RNA, 804 nt, synthetic construct
  misc_feature 1..804: note = source = /note="Description of Artificial Sequence: Synthetic coding sequence"
  source 1..804: mol_type = other RNA
atggggcctgaagctctgagttcactgctactgcttcttcttgttgcctccggcgacgccgacatgaagggccattttgacccggccaagtgtagatatgctttgggaatgcaagatagaaccatccccgactccgacatctcagcctcttccagttggtctgatagcacagctgcccgacattcccgcctcgaatcatccgacggagacggagcttggtgtcccgcaggctcagtgttccccaaggaggaagagtacctgcaggtggatctccagaggctgcacctcgtagcgctggtcggcactcagggaagacatgccggagggttggggaaggaatttagcagatcctatagattgaggtatagtcgagacggaagaaggtggatgggatggaaagaccgctggggccaggaggtgattagcggaaacgaggatccagaaggtgtggtattgaaggatctgggccccccaatggttgctcgtctggtccggttctacccacgcgctgatcgcgtaatgtcagtatgcctgagagtggagctttatggttgtctctggcgggacgggctgttgtcatacactgctcctgtcggtcagaccatgtatctctcagaagcagtatacttaaacgatagtacatacgacggtcacacagtgggcggcctccaatatggagggttaggacagctggcagatggagtggtaggcttggacgactttcgcaaatctcaggagctaagggtgtggcccggttatgactatgtcggctggtcaaatcattctttcagctcgggatactag

SEQ ID NO: 14546 - RNA, 345 nt, synthetic construct
  misc_feature 1..345: note = source = /note="Description of Artificial Sequence: Synthetic coding sequence"
  source 1..345: mol_type = other RNA
atggcaccaaagaaactctcctgtctccgcagcctgctattaccattgtccctgacgttgttgctgcctcaggcagacacacggtctttcgttgttgatcgcgggcacgatcgttttctcctagacggagcaccattcaggtacgtcagcgggagcctccactattttagagtcccacgcgtactatgggcggacaggttgttaaagatgagatggtccggcctcaatgcaatacaattttacgttccttggaactatcacgaaccacagcctggcgtgtacaacttcaatggcagcagggatctgatcgcattcctgaacgaagccgctctcgccaatctctag

SEQ ID NO: 14547 - RNA, 507 nt, synthetic construct
  misc_feature 1..507: note = source = /note="Description of Artificial Sequence: Synthetic coding sequence"
  source 1..507: mol_type = other RNA
gcaccccgcatggaaatgtttcagggtctcctgctcctgctgctgcttagcatgggaggcacgtgggcttcaaaagaaccccttcgtccgagatgccgaccaatcaacgccacgctcgccgtagaaaaagaaggttgccctgtttgtattaccgtgaataccactatttgcgccggttactgtcccaccatgactcgggttcttcagggggttctgccagctctaccccaggtggtttgtaattaccgtgacgtccgtttcgaatccattcggctcccaggatgtcctagaggagtgaaccccgtcgtgagttacgctgtcgcgcttagttgtcagtgcgctctgtgtaggagatctacaaccgattgtgggggccctaaagaccatcccttgacatgtgacgacccccggttccaggattcatctagctccaaagcccctcccccctctctcccgagtccgtcccgtctccccggtcctagcgacacaccaatcctcccccagtag

SEQ ID NO: 14548 - RNA, 1203 nt, synthetic construct
  misc_feature 1..1203: note = source = /note="Description of Artificial Sequence: Synthetic coding sequence"
  source 1..1203: mol_type = other RNA
atggagacacaagaattgagaggcgctctggcactcctgcttttgtgttttttcaccagcgcgagtcaggacctgcaggttatcgatctgcttaccgtgggggagtctcgacaaatggtggctgtggctgagaaaattaggacagccctgctgaccgctggagacatctaccttctaagtaccttcagacttccgccaaagcaagggggagtgttgttcggcctttattccagacaggataacacacgatggctggaagcatccgttgtgggaaaaattaacaaagtgacgaatgcactccattccatcctcggagagggaaatgttcctgaccctaagcaccactacggtgtatccggattccacgagcagcgatcccattgcagccctaatccttgcttcagaggcgtggattgtatggaggtgtatgagtacccgggatacaggtgcggaccatgtcctcccgggctccaagggaacggcactcattgctcagacattaacgaatgtgcacacgcagatccttgctttcctggttcttcttgcatcaacaccatgccaggtttccattgtgaagcctgcccacggggttataagggcacacaggtgagcggagtaggcattgactatgcccgagcaagtaaacaagtatgtaacgacatagacgaatgtaacgacggcaataacggtggatgcgatcctaattcaatctgcacaaacacagtgggcagctttaaatgtggtccatgcaggctcggcttcctcggaaatcaatcacagggatgtctgccagcaagaacatgccactctcctgcgcatagcccctgccacatccatgcgcactgcctattcgagcggaacggcgctgtatcctgccaatgcaacgtgggatgggctggtaatggaaacgtgtgcggcactgacacggatatcgacggttatcccgatcaagccctaccttgcatggataataataaacattgtaagcaagataattgcctgctgacacccaattctggccaggaagacgccgacaatgacggggtaggagatcaatgcgacgatgacgctgacggagatggtatcaagaacgtggaggcatctccaatggactggaccatagcactgaagtcacccacccactatagacaaaccggaatgcgaacaggctgggaaatgttggccaccgcggctctgaaatag

SEQ ID NO: 14549 - RNA, 618 nt, synthetic construct
  misc_feature 1..618: note = source = /note="Description of Artificial Sequence: Synthetic coding sequence"
  source 1..618: mol_type = other RNA
atgatgcggaccctaataactacgcaccccctaccattacttctcctcccccagcagttacttcagctagtgcagttccaagaagtagacaccgactttgatttccctgaggaggacaagaaagaagaatttgaagaatgcctggagaagtttttcagcaccggaccggcaagaccacccactaaagaaaaggtgaaaaggcgggtgctgatagagcctggcatgccactaaatcacatcgaatactgtaaccatgagattatgggaaaaaacgtgtattacaagcaccgctgggtagctgaacactacttcctgctgatgcaatatgacgaactccagaaaatttgctataatagatttgtgccatgcaagaacgggatcagaaaatgtaaccggagtaagggactggtggagggtgtgtactgcaatctgacagaagcgtttgagatacccgcatgtaaatatgagagcctgtaccgcaaaggatacgtgttgattacatgcagctggcaaaacgaaatgcagaagagaattccccatactatcaacgatctggtcgaaccacccgaacatcggagctttctgagcgaggatggcgtgttcgtaatttcaccatag

SEQ ID NO: 14550 - RNA, 177 nt, synthetic construct; identical to SEQ ID NO: 12911
  misc_feature 1..177: note = source = /note="Description of Artificial Sequence: Synthetic coding sequence"
  source 1..177: mol_type = other RNA

SEQ ID NO: 14551 - RNA, 450 nt, synthetic construct
  misc_feature 1..450: note = source = /note="Description of Artificial Sequence: Synthetic coding sequence"
  source 1..450: mol_type = other RNA
atgaaggttatcgccattctgactcttctgctgttttgctcaccaacccattcctcattctggcagtttcagagaagggtaaagcatataactggccgaagcgcattcttctcatattacggttacggttgctattgcggacttggggacaaaggcatccccgttgacgataccgacagacactccccttccagcccgagcccatacgagaaactaaaagaattttcctgccaaccagtgcttaacagctaccagttccatattgtcaatggcgcggtagtgtgcgggtgcaccctagggcccggtgcatcgtgccactgtcgccttaaagcctgtgaatgtgacaaacagtctgtgcactgtttcaaagagtccctccccacttacgaaaagaattttaagcaattttcaagccagccgcgatgtggacgtcataagccatggtgttag

SEQ ID NO: 14552 - RNA, 237 nt, synthetic construct; identical to SEQ ID NO: 12913
  misc_feature 1..237: note = source = /note="Description of Artificial Sequence: Synthetic coding sequence"
  source 1..237: mol_type = other RNA

SEQ ID NO: 14553 - RNA, 1461 nt, synthetic construct
  misc_feature 1..1461: note = source = /note="Description of Artificial Sequence: Synthetic coding sequence"
  source 1..1461: mol_type = other RNA
atgatctccccatcaccatcacaggaggagctccagacaacgctggaagaaacagaccagtcaacgcaggaaccttttacaaccaaaattcctagaaccacagagctggcgaaaacaacacaagctccacatcgtttttacaccactgttaggcctcgaacctctgataagcctcacatcagaccagtgctcaacagaactacaacccgaccaactcgcccaaaaccgtctggaatgccctctggcaacggtgtcggtaccggggtcaagcaagcaccacgtccttctggggctgaccggaacgtgagcgtcgatagcacacaccctacaaaaaagccagggacccgtagacctcccctgccgccacggccaacccacccaagacggaagccactcccccctaataacgtgacaggaaagccaggctccgccggtatcatttcatctggcccgattaccaccccccccttgcgctcaaccccaagacctaccggaactcccctggagcgaatagagaccgatatcaagcaaccaacagtacctgccagtggcgaagagcttgaaaatatcacagatttctctagttctccgactcgtgaaacagaccccctaggcaaacctcggtttaaaggcccgcacgttcgctatatccagaaacccgataatagcccctgctccatcaccgactcagttaagcgctttccaaaagaagaggcaaccgaaggcaacgcaacatcgccaccccagaatcctcccaccaacctgactgtagtcacggtagagggttgtccaagtttcgttatactcgattgggagaaaccattgaacgacaccgtgacagagtacgaggtgattagccgcgagaatggatcattctcaggcaagaataaatccatccagatgactaaccagacgttctccacagtcgaaaacttgaagcctaacacctcatatgagttccaagttaaacctaaaaaccccctgggggaagggcccgtgtccaatacagtagcctttagcaccgaatccgcagatcctagggtatccgaacccgtctccgcgggaagagacgcaatctggactgaaagacccttcaatagtgactcctactccgaatgcaaaggaaaacagtacgttaaacggacttggtacaagaagtttgtcggtgtgcaactgtgtaatagtctaaggtataaaatctatttaagcgactcactcaccggcaaattctataacatcggagaccaacgcgggcacggcgaagatcattgccagttcgtcgactcatttctcgatggacggacaggtcaacaactcacatctgatcagctacccataaaagaaggctactttagggctgtacggcaggagcctgtgcagttcggtgaaatcggcggtcacacccagattaactatgtgcagtggtacgaatgtggcacaacaatcccaggaaagtggtag

SEQ ID NO: 14554 - RNA, 243 nt, synthetic construct; identical to SEQ ID NO: 12915
  misc_feature 1..243: note = source = /note="Description of Artificial Sequence: Synthetic coding sequence"
  source 1..243: mol_type = other RNA

SEQ ID NO: 14555 - RNA, 1341 nt, synthetic construct
  misc_feature 1..1341: note = source = /note="Description of Artificial Sequence: Synthetic coding sequence"
  source 1..1341: mol_type = other RNA
atgttgcaccccgaaacaagccccgggcgcggccatttattagccgtgctgctcgctctcctaggcacaacttgggcggaagtttggcccccacagttacaagagcaggcaccaatggccggcgccttaaacagaaaggaatcatttcttctgctgtctctgcacaatcgcctccgctcctgggtccagccgcccgctgctgacatgagaagactggactggagtgattctctggctcagttagcccaagcacgtgccgctctttgcggaatccctacaccttccttagcctccgggctttggcggacactacaagtaggatggaacatgcagctactgccagccgggttagcaagctttgtggaggtggtgagtctttggttcgccgaggggcaacgctattcgcacgcagctggcgaatgcgcacgcaatgccacatgtacccactacacgcaactcgtgtgggcaacctcttcacagctgggttgcggcaggcacctgtgttctgcgggacagacagccattgaagcctttgtgtgtgcttacagcccgcgaggaaactgggaggtcaacggcaaaacaataatcccatataagaaaggagcatggtgtagcctgtgtaccgcctcagtcagtggctgttttaaagcctgggaccatgccggaggattatgtgaagtccctaggaatccgtgtagaatgtcttgtcagaaccacggaagactcaacatatccacctgccactgtcactgtccaccaggatatacgggaaggtactgtcaagtgcgctgcagcctgcagtgtgtgcatggaaggtttagagaggaggaatgttcgtgcgtctgtgatataggctacggcggagcccagtgtgcgacaaaggtgcatttccctttccacacatgcgacctccgtatcgatggagactgtttcatggtaagctcagaggctgacacctattaccgagcaaggatgaagtgccaacggaaagggggcgtgctggctcagatcaaatcacagaaagtgcaggatatcttagctttttacttagggcgccttgaaacaactaatgaggtcatcgacagcgatttcgaaacacggaacttttggataggattgacgtacaaaacagcaaaagacagcttcagatgggctaccggagagcaccaagccttcacctcctttgccttcggacagccagataaccacggattcggaaattgtgtcgagctgcaggcctcagcagcttttaattggaacgatcagcgatgtaaaacaaggaaccggtacatttgtcagtttgcccaagaacatatctcacggtgggggcctgggagttag

SEQ ID NO: 14556 - RNA, 432 nt, synthetic construct
  misc_feature 1..432: note = source = /note="Description of Artificial Sequence: Synthetic coding sequence"
  source 1..432: mol_type = other RNA
atgcaggccgcgtgctggtatgtccttttccttctacagcccaccgtctatctggtgacttgcgccaacctaacaaatgggggtaagtcggagttgttaaagagtggatcctccaaaagcacccttaagcatatatggaccgagtcctctaaagatctttcgatttcaagactgttgagtcagaccttccgcggtaaggaaaatgatacagacctggacctgcgctatgacacccctgagccatacagcgaacaagatctgtgggactggttacggaatagtactgacctccaggagcctagacctcgcgcaaaaagaagacccatcgtaaaaaccggtaagtttaagaaaatgtttggatggggcgacttccactccaatattaaaaccgtgaagttaaatctgctcatcaccggaaagatcgtggactag

SEQ ID NO: 14557 - RNA, 783 nt, synthetic construct
  misc_feature 1..783: note = source = /note="Description of Artificial Sequence: Synthetic coding sequence"
  source 1..783: mol_type = other RNA
atgcagggagaaccattcgcatgcttgacccaccaggagcctcttcccaagatgttcaagctgttaagccgggcgtacgccgacgtgcatcctatgatgatggaccggtctgaaaataggtgtggcggaaattttctgaaaaggggctctatcataaacggcgccgactggtattcttttactgggggaatgagtgattttaactacctgcatacaaattgctttgagattactgttgaactgggttgcgtaaagtttccgcctgaagaagccctttacatactttggcagcacaataaagagtccctgcttaactttgtcgagacagtgcatcgcggtatcaaaggggtagttaccgataaattcggaaaacccgtaaagaatgctcgaatttcagtcaaaggaatccgacacgacattaccacggcccctgatggcgactactggcgtttgcttccccccgggattcacattgtgatcgcacaggctcctgggtatgcaaaagtaataaaaaaggttattattccggcaagaatgaagagggccggcagggtagattttatcttacagcctctgggtatgggtccaaagaacttcattcacggactgagacgaacagggcctcatgaccctctgggcggcgcctctagtttgggtgaggcgacagaaccagacccactgagagcaagacgacaaccatccgccgacggctcaaagccatggtggtggtcctattttacgtcactctcaactcatagaccaaggtggctattaaagtactag

SEQ ID NO: 14558 - RNA, 882 nt, synthetic construct
  misc_feature 1..882: note = source = /note="Description of Artificial Sequence: Synthetic coding sequence"
  source 1..882: mol_type = other RNA
atgtcaagcggtggaggttcacgcggtctgctagcctggctgttgctcctgcaaccctggcccggacagaattgggctggcatggccgccccacggctgccatctcccttgttaagcgaggagggcggtgagaatcccgaagccagtcctgccccaggacctgaagctggccctcccctgaacttgttcacatcttttcccggagattctctcttgtgcggtaggacccccttgagaatagttggaggcgtagatgcggaggagggaagatggccatggcaggtctccgtcaggactaaagggcgccacatatgcggtgggacgctcgtcacagccacctgggtgctgacagccgggcactgcatctctagtagatttcattactccgtcaagatgggagacagatccgtttacaacgaaaatacatcagtggtagtcagtgttcagagggcctttgttcatcctaaattttcaacggtgaccacaattcgcaatgacctcgctctgttacagctccagcaccccgtcaacttcactagtaacatacaacccatctgtatcccccaggagaattttcaggtagaaggcagaacaaggtgctgggtaacaggttggggtaagacccccgagcgagagaaactggcctcggaaatcctgcaagatgtcgaccagtacatcatgtgttatgaggaatgcaacaagattattcagaaagctctttcaagcacgaaagacgtgataattaaaggtatggtgtgcggatataaggagcagggcaaagattcatgtcaaggagatagtggtggacgactggcatgcgaatacaacgatacatgggttcaggtcggtattgtaagttgggggatagggtgtggcagatag

SEQ ID NO: 14559 - RNA, 870 nt, synthetic construct
  misc_feature 1..870: note = source = /note="Description of Artificial Sequence: Synthetic coding sequence"
  source 1..870: mol_type = other RNA
atgtttgtactattgtacgtgactagtttcgctatttgtgcatctggacagcctagaggcaatcagctaaaaggtgagaattactccccccgatatatctgcagcattccaggcttgcccgggcccccagggccacctggagctaacggcagcccaggaccgcatggacgcattggcctgccggggagggatggaagggacggacgaaagggggagaaaggagagaaagggaccgccggactgcgaggtaagactggtccactgggattggctggcgaaaagggggatcagggagagacaggaaagaaaggaccgattggacccgaaggagagaaaggtgaggtgggtcctatcgggccccccggccccaagggcgataggggcgagcaaggagacccagggcttccaggcgtgtgtcggtgtgggagcattgtactgaaatctgcgttttctgttggtatcacaacaagctaccccgaggaacgtctacccattatcttcaacaaagttcttttcaatgagggcgagcactacaaccccgctactggcaaattcatctgcgcttttccaggcatttattacttttcatacgatatcacactggccaataaacacttggcgattggcttagttcataacggccaatatcgcattaagactttcgacgcaaataccggcaatcacgatgtcgcgagcggatctactgttatttaccttcagcctgaggacgaagtttggctggagatctttttcaccgatcagaatggattgttttccgatcccggttgggccgattccttattttccggatttctcttgtatgtggataccgactacctggacagtatatcagaagacgatgagctctag

SEQ ID NO: 14560 - RNA, 2742 nt, synthetic construct
  misc_feature 1..2742: note = source = /note="Description of Artificial Sequence: Synthetic coding sequence"
  source 1..2742: mol_type = other RNA
atgggccccgaagctctatcctccctgcttctgttgctgttggttgcctctggagatgctgatatgaaaggccacttcgaccctgctaagtgcaggtacgcactgggtatgcaagacagaacgattcccgatagtgatataagcgcttcttcctcatggtccgacagcaccgcagcccggcattcacgcttagaaagttctgacggagatggcgcctggtgcccagctggaagcgtgtttccaaaggaggaagagtacttgcaggttgatttgcagagattgcaccttgttgcactggtcggaactcaagggagacacgccggcggcctgggcaaagaatttagcaggagttatcgcctgcgatactcccgggatgggcgtcgctggatgggttggaaagatcggtggggccaggaagtcatctctggaaatgaggaccctgagggagttgtgctaaaggacttaggaccaccaatggtagcaagattagtgagattttatcctcgggcagaccgcgtcatgtcagtctgcctgcgggtcgagctgtatggatgcctgtggagggacggccttctgagctacaccgcacccgtaggtcagactatgtacctttctgaagccgtgtacctaaacgattccacatatgacggtcacacagtcggcgggctgcagtacggaggacttgggcaattagccgatggcgtggttggccttgacgactttcgcaagagtcaggaactcagagtctggccaggctatgactatgtgggatggagtaatcattctttttctagcggatacgtggaaatggaattcgaattcgatcggctccgagcttttcaggctatgcaagtgcattgtaacaacatgcatacgctgggcgccaggctgcctggaggcgttgagtgccgattcaggagaggcccagccatggcatgggaaggagaaccgatgcgtcataacctgggaggcaatctgggcgacccccgggccagagcagtgtccgtgccactgggcggaagggtggctaggttccttcaatgtcggttcctttttgctggaccgtggttactgttctctgagatttcttttatcagtgatgtggttaataattcttcccccgccttaggaggcacattccccccagcaccctggtggcctcccggacccccccccacaaacttctcctctctggagcttgaaccacgcggtcagcaaccagtagcgaaagcagagggctcccctaccgctattctgattggctgccttgtggccatcatcctgctcctacttctgattatagccttaatgttgtggagattgcactggcgccgcctattatcaaaagctgagagaagagttctcgaggaggaattgacagttcacttatccgtgccaggagacaccatcctgatcaataacagaccaggccctcgcgaacctcccccataccaggagcctcggcctcgcggaaacccccctcattctgccccttgcgtccccaacggttccgctctccttctgtcaaaccctgcttaccgtctcttgcttgctacctatgcgcgacctcctcgaggcccaggaccccctacaccagcttgggccaaacccacaaatacacaggcctacagtggcgattacatggaaccagagaaacccggagcaccccttctccctccccctccccagaatagtgtcccccactacgctgaagctgatatcgtgactctgcaaggcgtcacgggtggaaacacctacgcagtgcccgctttgcctccaggcgccgtcggcgatggtccccctagagtggatttccccaggtccagattgcgctttaaggaaaagctcggggaagggcagttcggagaagtacatctgtgtgaagtagatagtccccaagacctcgtaagtctagacttccccctgaacgttagaaaaggccaccctctgttggtggccgtaaaaatactgcgccccgacgcgactaaaaatgccagaaacgactttctcaaagaggtaaaaatcatgtcacggctgaaggatcccaacattatccgtcttcttggcgtgtgtgtgcaagacgaccctctctgcatgattacggattacatggaaaacggcgacctgaatcaattcctgtccgcccatcaactcgaggacaaagcagctgagggtgctcctggcgatggtcaagctgctcagggacctacaatttcatacccgatgctgctgcatgttgctgcccagattgcctccgggatgcggtacctggctactttgaactttgtgcatagagatcttgcaacacgcaactgtctggttggcgagaattttacaatcaagattgctgactttggcatgtcaagaaacctctacgccggtgactactacagagtacaaggaagagctgtcttaccaattagatggatggcttgggagtgcatcttgatggggaaatttaccactgcttcagacgtttgggcttttggagtaactctgtgggaggtactaatgctatgcagggcacagccatttggccagctgactgacgagcaggtgattgagaacgctggggaattcttccgcgaccaggggaggcaagtgtatctgtctagaccgccggcttgtccacaggggctctatgaactgatgttacgttgctggagtcgggaatccgagcagcgaccccctttctctcagctccacagatttcttgccgaagacgcactgaacaccgtatag

SEQ ID NO: 14561 - RNA, 1089 nt, synthetic construct
  misc_feature 1..1089: note = source = /note="Description of Artificial Sequence: Synthetic coding sequence"
  source 1..1089: mol_type = other RNA
atgcgcactctatttaacttactctggctggcactcgcttgcagcccagttcacaccacgttgagtaagtctgacgccaaaaaagctgcttctaagactttactggaaaagagccagttctccgataaacccgtccaagatagagggttagtcgttaccgatctgaaggcggaatccgttgtgcttgaacacagaagctactgtagtgcaaaggctcgggacaggcattttgccggagacgtgttaggctatgtcactccttggaatagccacggttacgatgtgacaaaggtatttggtagcaagttcacgcagatctctccagtgtggctgcaattgaagagacggggccgagagatgtttgaagtgaccggcttgcacgatgtggatcaggggtggatgcgcgcagttagaaagcatgccaagggtttgcacatagtcccacgcttattgttcgaagattggacatacgatgatttccggaacgtgcttgactccgaagatgagattgaggagctctcgaagacagtagttcaggtggccaaaaaccagcatttcgacggatttgtcgtggaggtctggaatcagttgctctcacagaagagagtgacagaccagcttggcatgtttactcataaggaattcgaacaactggcccctgtactcgatggatttagtctcatgacttacgactacagtacagcacatcagcctggacctaatgcccccttgagctgggtaagagcatgtgtgcaagtgctagacccgaaaagcaagtggagaagcaagattctgttgggcttgaacttctacggaatggactacgccacttctaaagatgcccgtgagcctgtggttggagctagatacatccagacacttaaggatcatagaccccggatggtatgggactctcaagcaagcgaacatttcttcgaatacaaaaaaagccgctccggaagacatgttgttttctatcctacactgaagtccctccaggtgcgactcgagctggccagagaattaggcgttggcgtctctatttgggagctggggcaggggttggactatttttatgacctgctctag

SEQ ID NO: 14562 - RNA, 1350 nt, synthetic construct
  misc_feature 1..1350: note = source = /note="Description of Artificial Sequence: Synthetic coding sequence"
  source 1..1350: mol_type = other RNA
atgaaatttcagggtccactggcgtgtctgttactcgcgttgtgtctaggctctggagaagccggaccgctgcagtccggggaagagagcacaggaaccaacatcggggaggctcttgggcacggcttaggagacgcgctcagtgagggcgtaggaaaagcaatagggaaggaagctggaggtgctgctggaagcaaagtgtcagaggccttgggccagggcactcgggaagcagttggtacgggagtaaggcaggtgcccggttttggagtggcggacgccctcggaaatcgcgtcggcgaggcagctcacgcactcggaaatactggccatgaaattggaaggcaagcagaggacgttatacggcacggggcagatgctgttagaggtagctggcagggggtacccggacacaacggggcatgggagacctctggcgggcacggaatttttggatctcagggcggtctgggaggacagggccagggaaatcctggcggtctcggcacaccttgggtccacgggtatccgggcaattctgccgggtctttcgggatgaacccacaaggcgctccatggggtcagggtggaaacggaggccctcccaacttcggcaccaatactcaaggcgcagtggcacagcccggatatgggtcagtccgtgcgagcaatcagaacgagggctgtacaaacccacctcccagcgggtcgggcggaggaagctctaatagcggtggcagctcaaccggaagtagcagcggcaatcatggtggatccgggggcggcaatggccataagccaggctgtgaaaaaccaggaaatgaggcaagaggtagtggggagtcagggattcaaggacaaggtagctcatggggatctggcggtggagatgccgttgggggcgtgaacaccgtgaactctgaaacctcccctggcatgttcaacttcgataccttctggaagaatttcaagtccaagcttggttttattaactgggacgccattaacaaaaatcaggtgcctcccccaagtacgagggccttactttattttagccgcttatgggaagattttaaacaaaacacaccatttctcaattggaaagccatcatcgagggcgccgacgcctcaagtctgcaaaaacgcgccggccgtgacgaccagcccggcgcaggttggcaggaagtagcagcagtgaccagcaaaaactacaactacaaccagcacgcgtaccctacagcatacggcggaaaatactcagtcaaaacacctgctaaaggcggagttagccctagttcttccgcctctcgcgttcaacccgggctgcttcaatgggtgaaattttggtag

SEQ ID NO: 14563 - RNA, 735 nt, synthetic construct
  misc_feature 1..735: note = source = /note="Description of Artificial Sequence: Synthetic coding sequence"
  source 1..735: mol_type = other RNA
atgtggggagcacccctgccacggcgtcctgtatgggatgttaggagcgcctctgctggaccacagccatgtctggggggaaagatgaaactaaatctggtccagatcttttttatgcttctgatgctgctcctcggactgggcatgggactcgggctcggcctgcatatggccactgccgttctagaagaaagcgaccagcccctgaacgaattttggtcctccgacagccaggacaaggctgaagccacagaagagggcgatggaacacagacaacagaaaccctcgtgttaagtaacaaggaagttgttcagcccggttggcctgaggaccctattttaggcgaagatgaagtgggaggcaacaaaatgctaagagccagtgcgctgttccaatcaaacaaggactatctcagactcgatcagactgaccgagaatgcaatgacatgatggcgcacaaaatgaaagagccctcgcagagttgcatcgcacagtatgccttcatccacgaagacctgaacaccgtcaaagcagtatgcaatagccctgtgattgcctgtgaactgaaagggggcaagtgtcataagtcaagtcgccccttcgatttaacgttgtgcgaactgagccaacctgaccaagtcacccccaattgtaattatcttacctccgtcatcaagaaacacatcataataacctgcaacgatatgaagaggcaactgcccaccggccagtag

SEQ ID NO: 14564 - RNA, 1728 nt, synthetic construct
  misc_feature 1..1728: note = source = /note="Description of Artificial Sequence: Synthetic coding sequence"
  source 1..1728: mol_type = other RNA
atggcttcatggttaaggaggaaactacgcggcaaacgccgccctgtcattgcgttttgtcttctgatgatcttaagcgccatggctgttactcgattcccgcctcagaggccctcagctggcccggatcccggaccaatggaaccacagggtgttacgggtgcacctgccactcacatcagacaggccctttcatcctcccggcggcagcgggctcgtaatatgggattttggcggtccagagcactgcctagaaattcaattctggtgtgcgcagaagaacaggggcacagagctagggttgataggtctagagagtcccctggcggtgatcttcgacacccgggaagagttaggcgtgatattacattgtccgggcatccaagactgtcaacacagcacgtggtgctcctgagagaggacgaggttggggatcctggcacaaaggacttaggacaccctcagcacggcagcccaatccaagagacccaatctgaggtggtgacactggtgtcccctctcccaggctcggacatggcggcactacctgcttggcgagctacttccgggctcactctatggccccatacagcggaaggtagagatttgttaggggccgagaaccgggccttgacagggggccagcaggcagaggaccctacattggcttctggggctcatcagtggccaggttcagttgaaaagctgcaaggcagcgtgtggtgcgatgcagaaacattgttgtcatcatctcgcaccggaggccaggcacctccatggttaaccgatcacgacgttcagatgttacgtctgcttgcccaaggggaggttgttgacaaagcgcgcgttccagcccacggacaggtcctgcaagttggattctcgaccgaagccgcgttgcaggatctctccagccccaggctgagccagctttgctctcagggactttgtggcctaatcaagcgaccaggagatctgcccgaggtccttagtttccatgtcgaccgagtgcttggcctacgtcggtctctcccagctgttgcgagacggttccatagccctcttcttccctatcgatacactgacggtggcgcccggccggttatttggtgggccccagatgttcagcacctgtcagaccctgatgaggatcaaaattctcttgccctcgggtggcttcagtaccaagccttgcttgcccactcatgcaattggcctggtcaggccccatgtccgggcatccaccataccgaatgggcacggctggcactttttgactttctactgcaagtacatgaccgcctggatcgctattgttgcggattcgagccagaaccctcagacccctgcgtcgaagagaggctgagagagaagtgccagaaccccgccgaacttagactcgtacatatactggtccggtcgtccgacccttcacacctggtctacatagataatgctgggaacctgcagcatcctgaggacaagttaaatttcaggctgttggaggggatagatggattcccagagtcagctgtgaaagtgctggccagcggctgccttcagaatatgctactcaagagtctgcaaatggatcctgtcttttgggagagccagggaggcgcacaaggactaaaacaggtgctccaaacactggaacaacgtgggcaggtgttgctcggtcacatccaaaaacataatcttacactgttccgcgatgaagatccttag

SEQ ID NO: 14565 - RNA, 390 nt, synthetic construct
  misc_feature 1..390: note = source = /note="Description of Artificial Sequence: Synthetic coding sequence"
  source 1..390: mol_type = other RNA
atggctgcgggatctgctccaatgcaactccacctgcgcgcaacaatccggatgaaagacggactgtgtgtgccccgaaaatggatataccatctcaccgaaggtagtacagacctccgtacagaggggagaccagatatgaagactgaattattttcctcttcgtgccccggcggcataatgctcaacgaaacaggtcaagggtaccagagattcctgttgtacaacagaagcccacatccgccagaaaaatgtgtggaagaattcaagtccctcacatcctgcctcgattcaaaggcctttctgctgactccccgaaaccagggaaaaggcttaaaatcccataaaaccggattgggtttaacaaaatcgagtggcgtgaccgggtag

SEQ ID NO: 14566 - RNA, 567 nt, synthetic construct
  misc_feature 1..567: note = source = /note="Description of Artificial Sequence: Synthetic coding sequence"
  source 1..567: mol_type = other RNA
atgttccaccagatctgggcagcgctgttatacttctatggaattatccttaactcaatctaccagtgccctgaacattcccagctcaccacattgggcgtggacggaaaagaattcccggaagttcacttaggacagtggtacttcatcgccggagctgcacctactaaagaggagctcgcgacctttgaccccgtcgacaatatcgtcttcaacatggcagccggcagcgctccgatgcaattacacctgcgcgccacaatcagaatgaaagatggtctttgcgttccgcgaaaatggatctatcacttgaccgagggatcaactgacctgaggaccgagggaagacccgatatgaaaactgaactgttcagctcaagttgccccggaggaataatgcttaacgagactggccagggctaccaacggtttctcctgtataacagatcgccacacccacctgaaaagtgcgtggaggagtttaagtccctgacgtcttgccttgactccaaagcatttctgctgacaccccgaaaccaggaggcttgcgagctgagtaataattag

SEQ ID NO: 14567 - RNA, 2676 nt, synthetic construct
  misc_feature 1..2676: note = source = /note="Description of Artificial Sequence: Synthetic coding sequence"
  source 1..2676: mol_type = other RNA
atgttgccaaccgaggttccacaaagccaccctggtcccagcgccctgctccttctgcagctcctcctaccccccacctcagcgttttttccaaacatctggtccctgctggccgcccctggaagcattacacaccaagatctcaccgaggaagccgccttgaatgtcaccctgcagttgtttctggaacaaccccctcccggcagacccccactgcgccttgaggattttctcgggaggacactgctggccgacgacctcttcgccgcttacttcggccccggctctagtagacgttttcgggccgctctaggagaagtcagccgcgccaatgcagcccaagatttcctgcctactagtagaaacgacccagacctgcactttgatgcagaacggctgggccaggggagagcccggttagtgggagcattacgtgagactgtagttgccgcccgcgcattagaccacaccctggcaagacaacgcctcggtgccgccctgcacgccctccaggacttctactcccacagtaattgggttgaactcggagagcaacagcctcatcctcaccttttgtggccccgccaagagttacagaatctcgcacaggtagctgatcccacatgttcagactgtgaagaactatcttgtccgcgtaattggctcggcttcactttgctaacctctgggtactttgggacacatccccccaaaccacccgggaaatgctcgcacgggggacactttgatcgcagcagcagccagcccccaagaggcggcatcaataaggacagcacatctcctggattcagtcctcatcacatgctgcatttacaggccgccaaattagcccttctggcgtctatacaagccttttccctactgcgctcacgactaggcgacagagatttttcaagattgctagacattacacccgcctctagtctttcctttgtcctggatacaactggaagcatgggagaagaaatcaatgctgccaagatccaagcacgccacctcgtcgagcagcgcaggggcagccccatggaacctgttcactacgtgttagtgccctttcacgatcccggattcgggcctgttttcaccacttccgatcccgacagcttttggcaacagctgaatgaaatccacgccctcggaggaggcgacgaacccgagatgtgcctcagcgcactgcagctggctctactgcacacaccgcctctgtccgacatatttgttttcaccgacgccagccccaaggatgcattcctgactaaccaagtagaaagcctgacacaggagcgtcgttgccgcgtgacctttcttgttaccgaagacacgagcagagtccaggggagagcacggcgggagattctgtcaccattaagatttgaaccatacaaggccgtggccctggcttcagggggggaagtgattttcacaaaggatcagcacattagagatgtggccgcaatagtaggagagtctatggccgccctcgtgacactacccctagatcctccagtagtcgtccccggccagccactcgtgttctctgtcgatggacttctccagaaaattacagtccggattcatggagatattagttccttttggatcaaaaacccagcaggagttagccaaggacaggaggaaggaggaggtccccttggacatacccgcagattcggacagttttggatggtaacaatggatgacccccctcagaccggtacttgggagatacaggtcactgcagaagacactcccggtgtgcgcgtgcaggcacagacctcactggattttctgttccatttcggaatacctatggaagacggccctcaccccggcttatatcctctgacacaacccgtcgccggactccaaacccagctgctggtcgaagtcactggcctaggctcacgcgccaatcccggggaccctcagccgcacttttctcacgtgatcctacggggtgtccctgaaggcgcggagctcggtcaagtacccctggaacctgtaggaccccccgaacgaggtctcctggccgcatcgctgtcacctacgctgctgtccacaccccggcccttcagtctggagcttataggccaggacgcagctggcagacgtcttcaccgtgccgctcctcagccatcaaccgttgtgcctgttctgctcgaactgtctggcccctctggattcctcgcgccagggtctaaggttcccctgtcattaaggatcgcgtctttttctgggcctcaagatctcgatctgcggacgtttgtcaacccctcattcagcctcacctctaacctgtcaagggcccacctcgaactgaacgagagcgcctggggcaggctgtggctggaagtgcccgatagtgccgctcccgattccgtggtaatggtaacggtcactgccggcggaagagaagccaatcctgtaccaccaacacatgcttttctgcgtcttctcgtttcagcccccgcccctcaggatcgccatacaactccaacaggctcatcagacccaatactcactaccgccacacccgcattttctcctttcacactggtcactcaaggacgagcgggggcagggctcgccgctggttcaccttggtggggcactgttggcggggtgctgctgcttctgggtcttgcaagctggtag

SEQ ID NO: 14568 - RNA, 2742 nt, synthetic construct
  misc_feature 1..2742: note = source = /note="Description of Artificial Sequence: Synthetic coding sequence"
  source 1..2742: mol_type = other RNA
atgggacccgaggctcttagctcattgcttcttcttctcctggtggcctcaggtgatgcagacatgaagggacactttgacccagccaaatgcaggtatgctttgggaatgcaggatcggaccattcctgattccgatatctccgcctcctcttcttggtcagactcaaccgctgccagacatagccgcctggaaagcagcgacggcgacggagcttggtgccctgctggctccgtgttcccgaaggaagaagagtacctgcaagtcgatcttcaacgcctccatctggtggctttggtggggacgcagggaagacacgctggtgggctcgggaaagagttctcacgctcgtatagattaagatatagtcgcgacggaagacgatggatgggctggaaggatcggtggggccaggaagtgataagtgggaatgaagacccagaaggtgttgtgctgaaggatttaggacccccgatggtggctcgactagtgaggttctacccccgcgcggatcgggtgatgtctgtgtgtttgagagtggaactgtatggatgtctctggcgtgacggacttctgtcttataccgctcccgtcggacagacaatgtatttaagcgaagccgtttatcttaacgacagcacttacgatggacatacagtcggcggtctccagtatggaggtcttggccagttagcagacggggtggttggattggacgatttccggaagagtcaggagcttagagtttggcccggctatgattatgtggggtggtctaaccattcctttagtagcggatacgttgagatggaatttgagtttgatcggctgagggcattccaagccatgcaggtgcactgtaacaacatgcataccctcggcgctaggctaccaggcggagtagaatgtaggttccgcaggggccccgccatggcatgggagggcgagccaatgaggcataacctagggggcaatctcggagaccccagagctcgggccgttagcgtgcctctgggtgggcgggtagcacgttttttacaatgcagattcctcttcgccgggccttggctgctgttttctgaaatctcttttatatctgacgtggttaataattccagtccagcattaggcggcacgtttccaccagcaccatggtggccaccgggacccccccccacaaatttctcttcgttagagcttgagccacgaggccaacagcccgtagccaaagctgaagggagtccgacagcaattctcataggctgcctggttgctatcatcttgctgctgctcttgattatcgctctcatgctgtggaggttgcactggaggagacttctctctaaggcagagaggcgggttctcgaagaagaattgactgtgcacctctccgtgcctggcgacactattcttatcaacaacagacctggaccacgcgaacctcccccatatcaagaacctcgtccgcgcggcaacccaccgcattctgccccttgcgtacccaacggttctgctcttctgttgtcaaaccccgcttatcgcttgttgctcgccacctacgcaagaccacctagaggacccggaccccccactcccgcttgggctaaacctaccaacacacaggcttattccggcgactatatggaacccgaaaagcccggagcacctctattgccgccccccccacagaattcggtcccacattatgcagaagccgatattgtcacactacagggggtcaccggtggcaatacctacgctgtgccagcattgccaccaggcgctgtgggagatggtccccctcgtgttgatttccccagatcaagactgagatttaaggaaaagttgggcgaaggtcagtttggcgaagtacacctatgtgaggttgactccccgcaggacttggtgagcctagattttcctctcaacgtcagaaaaggtcatccccttttggttgcagtcaaaattcttcgacctgatgccacaaaaaacgctcgcaacgactttctgaaggaagttaagatcatgtcacgcctgaaggacccaaacattattcgcctgctcggcgtctgtgtgcaggacgacccactatgcatgattaccgattatatggaaaatggtgatctgaaccaattcctgtccgcgcaccagctggaagacaaagccgccgaaggagcacctggcgatggtcaagcagcacaaggacctaccattagctaccccatgttactccacgttgccgcgcaaattgctagcggaatgagatatcttgccaccctgaacttcgttcaccgcgacctcgcaacccggaattgcctggtgggggaaaacttcaccatcaagatagccgatttcgggatgtcccggaacctgtatgcaggtgattactatcgtgtacagggaagagcagttctgccaatcaggtggatggcatgggaatgtattctgatggggaaatttaccactgcctctgatgtttgggcatttggagtgaccttatgggaggtgcttatgctgtgtagagcccaaccatttggccagctgaccgatgaacaagtaattgagaacgccggcgaatttttccgggaccaaggcagacaggtatatttaagcaggccacccgcctgtccccagggtctctatgaattaatgttaaggtgctggtcgagggagtccgagcagagacctccattctcgcaattgcatcgtttcttggccgaggacgctctcaatacagtttag

SEQ ID NO: 14569 - RNA, 453 nt, synthetic construct
  misc_feature 1..453: note = source = /note="Description of Artificial Sequence: Synthetic coding sequence"
  source 1..453: mol_type = other RNA
atgcgctttatggctggccctgccggttctcagagtcttggacccctctgttttcactctagcccccaggccttatacacggtgctcctaatcgtccttgtgatgatgtctcttgtctttggaaaatttgttcctgtcaactgggaaccccctcagcctctcccatttccaaaatacctccgctgctataggtgcctcctggaaactaaggaactgggttgtctccttgggtctgatatctgcttgacccctgctggtagctcttgcataaccctgcataaaaagaattcttcggggagtgacgtcatggtatcagattgcaggtccaaagaacaaatgagtgattgttccaacacccggacctctcccgtcagcggtttctggatcttcagccaatattgttttcttgacttctgtaatgacccccaaaatcgcggattgtacacaccctag

SEQ ID NO: 14570 - RNA, 192 nt, synthetic construct; identical to SEQ ID NO: 12931
  misc_feature 1..192: note = source = /note="Description of Artificial Sequence: Synthetic coding sequence"
  source 1..192: mol_type = other RNA

SEQ ID NO: 14571 - RNA, 1212 nt, synthetic construct
  misc_feature 1..1212: note = source = /note="Description of Artificial Sequence: Synthetic coding sequence"
  source 1..1212: mol_type = other RNA
atgcagggtactcccggcggtggaactagacccggcccatctccagttgatcgaaggaccctgctcgtgttttcttttatccttgctgccgcccttggccagatgaatttcactggggaccaggttctgagagtgctcgcaaaggacgagaaacagctatcactactgggagatttggaaggcttgaagccacagaaggtagacttctggagaggaccagcaaggccttcattacctgtggacatgcgagtgccattcagcgaactgaaagatataaaagcctatttggagtcccatggcctggcgtatagtatcatgatcaaagacatccaagtacttctcgatgaggaaagacaggctatggcaaaatcaagacgattagaacgttccaccaattcgttctcttactcttcatatcatacactggaggaaatatatagttggatagacaactttgtgatggaacatagtgatattgtcagtaagatccagattggaaactcttttgaaaatcaaagcatcctagtactgaagttcagtacgggtggcagccgacatcccgcaatctggattgataccgggatccatagcagagagtggattactcacgccacaggcatttggaccgctaacaagatcgtctcagattatgggaaagacagggtactcacagatattctcaatgcaatggacatctttatcgagctggtgactaaccctgatggcttcgcctttactcactcaatgaatcggctctggagaaaaaacaagagtatacgacccggtattttctgtatcggcgtggaccttaatcgcaactggaagagcggctttggtggcaacggctctaactcaaatccttgcagcgaaacttatcatgggccatctccccaatccgagcccgaagttgccgcaatagttaatttcatcactgcacacgggaatttcaaggcgttgatctccatccattcatattcacagatgctgatgtatccctacgggcggctgctggaaccagtgtctaatcagcgagaacttatgtggcccgtgggcagcccttctacgggacctatgactgtcgcctcatcgaccccctctgctctgtctagtggtaccctcggctccatggcatcatgttgccgcccgcatcgttcgagccccaggccaagaaggcgcggttggcggttcggcccaagctggtccacgccctag

SEQ ID NO: 14572 - RNA, 1542 nt, synthetic construct
  misc_feature 1..1542: note = source = /note="Description of Artificial Sequence: Synthetic coding sequence"
  source 1..1542: mol_type = other RNA
atggcccctgctcgcactatggcccgggcccgactcgcccccgctggtatcccagcagtcgccctgtggctgctctgcacactcggcttgcaaggcacacaggccggcccaccacccgctcctcctggccttcccgctggagcagactgccttaatagttttaccgctggggtgcctggtttcgtgttggatacaaatgcttcagtgtctaatggagccacttttctcgaatccccaacagtgcgcagaggctgggattgtgtacgggcttgttgtactacccagaattgtaacctcgctcttgttgagttgcagccagatagaggagaggacgccatagcagcctgcttccttataaactgtttgtacgagcagaatttcgtttgtaagttcgctccaagagaagggtttatcaattacttgacccgagaggtttatagatcttaccggcagcttagaactcagggatttggtggttctggtattccgaaggcatgggccggcatcgatcttaaggtgcaaccccaagaaccgctggtactaaaagatgtagagaataccgattggcgtctccttaggggcgatactgatgtgcgggtggaaagaaaggatcctaaccaggtcgagttgtggggtctcaaggagggcacctacctatttcaactaaccgtgaccagttcggaccatcctgaagacactgcaaatgtgacggtcaccgtgttatccactaaacaaaccgaagattattgtttagcctccaacaaagtgggtcgatgtagaggtagtttcccaaggtggtactacgacccaaccgagcagatttgtaagtccttcgtctacggcggttgcttaggcaacaagaataactacctgcgcgaggaagaatgtatactagcctgtcgaggcgtccagggaccttctatggagagacgtcaccccgtctgttccggcacttgtcagcctactcaattccggtgctctaacggctgttgtattgactccttccttgaatgcgatgacactccaaactgtccagatgcgagcgacgaggcagcctgcgaaaagtacacatctggcttcgacgaattacagcgtatccattttccaagcgataaaggccactgcgtagatctaccggataccggtctttgtaaggaatccatcccaagatggtattacaatcccttttcagaacactgcgcaagattcacatacggtgggtgttatggcaacaagaataacttcgaagaagaacaacaatgtctcgagagctgtaggggtatatctaaaaaggacgtgttcggattaaggagagaaatcccaataccaagcaccggcagcgttgaaatggcggtggcagtgtttctggtcatatgcatcgtggtggtggttgctatcctgggctactgcttcttcaaaaaccagagaaaagattttcacggtcaccatcaccacccaccccctacccccgcgtcaagcaccgttagtacaacagaagatacagaacatctcgtctataatcatactactcgccccttatag

SEQ ID NO: 14573 - RNA, 798 nt, synthetic construct
  misc_feature 1..798: note = source = /note="Description of Artificial Sequence: Synthetic coding sequence"
  source 1..798: mol_type = other RNA
atggcaccttggtctcatccatccgcccaactgcaacctgtgggaggagacgccgtctcacccgccctgatggtcctactctgtctgggactctccctgggaccccggacacatgtgcaggccgggaacctctccaaagcaaccttgtgggctgagcccggttctgttatctcccgcggtaacagcgttactatccgatgccagggtacactcgaagcacaggagtatcgattggtgaaagagggttcccctgaaccttgggatacccagaatcccctcgagccaaagaacaaagctcgttttagcatcccatcgatgacagagcaccacgcaggtcgttacagatgctactactactcccccgccggttggagtgaaccttcagaccccctggaactagttgtgacagggttctataacaaaccaacactttctgcactgcctagcccagtcgtcacttccggcgagaacgtaacattgcaatgcggctctagactgcggttcgatcgatttattctgactgaggagggtgatcataaattgtcctggactcttgactctcaactcaccccatcggggcagttccaagcgctttttcccgtgggtccagtgacaccgagccacagatggatgctccggtgctatggatcacgtcgccacattttacaggtttggtcggagccctcagacctattagaaatccccgtctccggcgaagaggccacagtgttttccagtacgattcagggaagtcagactggctgtggtgagctctacaggcaaggatccccatgttag

SEQ ID NO: 14574 - RNA, 795 nt, synthetic construct
  misc_feature 1..795: note = source = /note="Description of Artificial Sequence: Synthetic coding sequence"
  source 1..795: mol_type = other RNA
atggaaaagccgatcttaaaaaacctcaacgaaatgctctgtccaatcattgctagcgaagtgaaagcgctgaatgccaatctgagcacacttgaggtccttactaaaattgataactacacactgctggactattctttaatctcctcccccgaaatcaccgagaactacctggacctaaatttgaagggtgtcttctatcccctcgagaaccttactgatccgccattctcccctgtcccatttgtgctacctgaacgcagcaactccatgctctacataggtattgccgagtacttctttaagagcgccagtttcgctcactttactgccggcgtattcaacgtgaccctatctactgaagagatatccaatcattttgttcagaacagtcagggactgggcaatgtactttcacgtgtagcttcaaccagcgtggggcttgtcatcttgggccaaagacttgtctgttccctttcactgaaccgctttagacttgcacttccagaatcgaatcgttctaatattgaggttttacgtttcgaaaacatcttgtcaagcatcctgcatttcggtgtcctcccactggccaatgccaagctgcagcaaggatttcctttatctaatcctcataaattcctctttgttaattctgatattgaagtcctagaaggatttctgctcatatccacggacctcaaatacgagacctcctctaaacagcagccgagttttcacgtctgggagggtctcaatcttatctctaggcaatggcgcggcaaatctgccccttag

SEQ ID NO: 14575 - RNA, 117 nt, synthetic construct; identical to SEQ ID NO: 12936
  misc_feature 1..117: note = source = /note="Description of Artificial Sequence: Synthetic coding sequence"
  source 1..117: mol_type = other RNA

SEQ ID NO: 14576 - RNA, 567 nt, synthetic construct
  misc_feature 1..567: note = source = /note="Description of Artificial Sequence: Synthetic coding sequence"
  source 1..567: mol_type = other RNA
atgttccatcaaatttgggccgccctgctttatttttacggtataatcctgaacagcatataccagtgtcccgagcatagtcagctcaccacactgggagtggacgggaaggagttccccgaagtccatttaggtcagtggtacttcatcgctggcgcagcaccaacgaaggaagaactagctacattcgacccagttgataatatagtgttcaacatggcagctggctccgcccctatgcagcttcacctccgtgcaaccatccgaatgaaagatggtctatgtgttccaagaaagtggatttaccacctaacagaaggatcaactgacctaaggactgagggcagaccagatatgaaaaccgaactgttctccagctcttgccctggcggcattatgctgaacgagaccggccaaggataccagcgattcctcctgtacaatcggtccccacatcccccagagaagtgtgtcgaagagttcaagtcactcacgtcttgtcttgatagtaaagcgttcctattgacacctcggaatcaagaggcttgtgaactatccaacaactag

SEQ ID NO: 14577 - RNA, 600 nt, synthetic construct
  misc_feature 1..600: note = source = /note="Description of Artificial Sequence: Synthetic coding sequence"
  source 1..600: mol_type = other RNA
atggaaaccttccctctacttttactctctttagggctggttctagccgaagcctctgagtctacaatgaaaattatcaaagaagagtttaccgacgaagaaatgcagtacgatatggcgaagagtggccaggagaagcaaaccattgaaatccttatgaatcccattctccttgtgaaaaatacgtccctttcaatgtcaaaagacgatatgagcagcacgctactgacatttcgttcacttcactataacgacccaaaggggaactcatctggcaatgacaaggaatgttgtaacgacatgaccgtgtggagaaaagtaagtgaagcaaatggatcgtgcaaatggtctaataactttatcagaagcagtacggaagttatgcgaagagtgcatcgagccccgtcttgtaaatttgtacagaatccgggcatctcttgctgtgaaagtcttgagctggaaaacacagtctgtcaatttaccacgggaaagcaatttcctcgctgccagtatcactctgtcacttcactagaaaagatcttgactgttctaacaggccacagtctgatgtcctggctcgtttgcggcagtaagctatag

SEQ ID NO: 14578 - RNA, 30 nt, synthetic construct; identical to SEQ ID NO: 12939
  misc_feature 1..30: note = source = /note="Description of Artificial Sequence: Synthetic coding sequence"
  source 1..30: mol_type = other RNA

SEQ ID NO: 14579 - RNA, 831 nt, synthetic construct
  misc_feature 1..831: note = source = /note="Description of Artificial Sequence: Synthetic coding sequence"
  source 1..831: mol_type = other RNA
atggccccctcacctctgcagagactacattgcggcccttcaccgagtcccaggcccacagaagtacctcgggggacagtgtccgtctcatgtcggtacctgaagaacagccttcatgtctttgtcagcggcggagctatcggcacttcgtccccagcccttttggagtgccaagaaggtgtcggaccagcacgtccctccctcctcgttcctcctccacctcgccctcgccgcttagatctcgcgagaacacttcccgctgagcgcaccgatagtcagagcctgtatatcgtgtatatcgcactgccaggccgtacaccaagacctgcccttgcttttgcgtttctaatgcccgcgtgttgcaaccgaccaagccctcgaccttccccagcgcatctaaccgcttccagtgtgctgagaagacagcgtcacgtcctagccgcttccgctgcaagcccatgccagtggagcgggctcagagtagcacattccttaagacaggtggttagcctgtgccctaggtgtaccggatcctgcccattctctggcgcatgtgcttcatcgctgccatcccctctttcttgtccacattcacactctggatcctggggaacctggagccaggggaggccctgctcgtctacagaagtcgccggcctggctctgtggccaacagacttcttgtcatgcctcttagatgcaagcgaactccaaacccagggcagtcacggtttctcttttacccccacaggcttctctagcaaccggaaagttggtgtgggatcttgcagggacggcgctggacggggggccatgggcggtctgttttag

SEQ ID NO: 14580 - RNA, 678 nt, synthetic construct
  misc_feature 1..678: note = source = /note="Description of Artificial Sequence: Synthetic coding sequence"
  source 1..678: mol_type = other RNA
tgagctgaccttccatcatgttggggcgccgggccgtgctatacaggccataaggtaggcgccctgcgtagagatacagtgatctgttgttgtagacatggagattattccacgccctgtctcttcacacccggtaaacccagtagaaatccctcgccgtggaaaaggacactgtggactctgtcagcaccatgggctggacctgccggatggactggtgaggaacaaaacgcaaccaaaaccggcctgattactcgcagaccccggcctctgaggagacgaccccacccggctcctgctagtcctctgcccgaaattatccgcggcaatataccacgaatgcttggtaagttcgtccctgtaaattgggagcctccccaaccgttgccttttcccaaatatttacggtgttatcgctgccttctcgaaactaaggaattaggttgcctcctcggatcagatatctgcttaacccccgccgggtcatcgtgcataactctgcataaaaagaactcaagtggctctgacgtgatggtgagtgactgcaggtccaaagaacagatgtcagactgtagtaacaccaggacttcacccgtgagtggtttttggatattctcacagtactgctttctcgacttctgtaacgacccccagaaccgaggcttatataccccttag

SEQ ID NO: 14581 - RNA, 534 nt, synthetic construct
  misc_feature 1..534: note = source = /note="Description of Artificial Sequence: Synthetic coding sequence"
  source 1..534: mol_type = other RNA
atggttcccgccgccggcgcgcttctctgggtcctgctccttaatctggggccccgcgctgccggagcccagggcctgacccagacacctacggaaatgcaacgagtctcactgcgcttcggcggacctatgactagaagctatcgctccactgcccgaacaggactccctcggaaaaccaggattattttggaagacgaaaatgacgcgatggcagatgccgacagactggccggaccggctgccgcggagctgctggccgccactgtatccaccggattttctcgatctagcgcgatcaatgaggaggacggatccagcgaagagggcgtagtcattaatgcaggaaaggacagtacatccagagagctcccgtcagcaacccctaatacagccggcagcagcagtaccaggtttatcgcaaactctcaagaacccgaaatcagattaacgagcagcctccctcgatctcccgggcgcagcacggaagacttgcctccctgccatctgctccggatttgtggatggtgttag

SEQ ID NO: 14582 - RNA, 912 nt, synthetic construct
  misc_feature 1..912: note = source = /note="Description of Artificial Sequence: Synthetic coding sequence"
  source 1..912: mol_type = other RNA
atgctacacccagaaactagccctgggcgaggccacctgcttgctgtgttacttgccttgttaggaactgcatgggccgaggtgtggccaccacagttacaagaacaggctcccatggccggcgcccttaataggaaggaatcctttcttctactatcattgcacaatcgtctacgctcctgggtgcagcctcccgcggctgacatgagacgacttgactggagcgactccctcgcccaactagctcaggctagagcggctctttgcggcatccctactccttctctcgcttccggactctggaggacattacaagtcgggtggaacatgcagttactcccagcaggcctcgccagttttgtggaggttgtctctctctggttcgctgaggggcaaagatactcccatgcagcaggcgagtgcgccagaaatgctacatgcacccactatactcaactggtctgggctacctcttctcagctaggctgcgggcgacatctgtgttcagctggccaagcagccattgaagccttcgtgtgcgcgtacagcccaagaggcaattgggaggtcaatggtaaaactatcgtgccttataaaaaaggcgcctggtgctccttgtgtaccgccagcgtatccggatgttttaaagcatgggatcacgccggtggcctatgcgaagtgccccgaaatccttgccggatgtcttgtcagaaccacggacgacttaatatttcaacttgccattgccactgcccacctggttatacaggccgctactgccaggtgcggtgctccttgcagtgcgtgcacggtcgttttagagaagaagaatgttcctgcgtgtgtgatatcggatatggagaacccagcgtgccaccaaggtgcattttcccgtcgacacccgtgacgtag

SEQ ID NO: 14583 - RNA, 1482 nt, synthetic construct
  misc_feature 1..1482: note = source = /note="Description of Artificial Sequence: Synthetic coding sequence"
  source 1..1482: mol_type = other RNA
tccgaggctgtgtatctgaatgattcaacctacgacggacacaccgtgggcggattgcagtacgggggcctgggtcagctggctgacggcgttgtgggtctggacgattttcgcaagtcccaagaattgagggtgtggcccggctatgattatgtgggttggagtaaccatagtttctcgagtggttacgtcgaaatggaatttgagttcgaccgcttgcgagccttccaagccatgcaggtgcactgtaacaacatgcatacattgggtgcaagactccccggaggcgtggagtgtaggttcaggcgtggccccgcaatggcatgggaaggtgaaccaatgcgacataacctcggagggaatctgggtgaccccagagctagagcagtctcagtacccctggggggtagagtggcgcgttttttacagtgtaggtttctttttgcaggcccctggctcctcttttccgagatcagcttcattagcgatgtggtcaacaacagctctccggcgctgggcggaacatttccacctgccccctggtggcctcccggtccacctccgacaaattttagtagtttggaactcgaacccagaggccagcagcctgtggccaaggccgagggttcccccacagccattcttatcggctgtctcgttgctattattctcctcctactgctcatcattgcgttgatgctgtggaggttacactggaggcgcctgttgtcgaaagttctagaatcacatcctcgcactcggtctcctggtcttgttgggattaggcccaccccacttcctgtgtccccgatggccctccgatgctgttctcccatccaacctacagcatccttctggcctctgactcctgtacccctcgaggcacgagcacccccccacccacccggccctaatccacccaccccaagaggcgtgacgggcgggaacacctacgcagtcccagctctgccccctggagccgtcggtgacggccctcctcgcgtagacttccctcgatccaggctgaggttcaaggaaaaactgggagagggccagtttggcgaggtccacttgtgtgaagtcgactccccccaggacctggttagcttagacttccctttgaatgtcaggaaaggccacccattactagtggccgttaagattctaaggcctgatgccactaagaacgccagaaacgatttcttaaaggaggtcaaaatcatgagcagactcaaggacccaaacattatcaggttactgggcgtgtgcgtgcaggacgatcccttgtgtatgatcaccgactacatggagaatggagaccttaatcagtttttatccgcgcaccaattagaagacaaagcagccgagggtgccccgggcgacggccaagcggcgcagggccctactattagttacccaatgcttctacacgtggctgcccagattgcatccggcatgcggtatctggctaccctgaactag

SEQ ID NO: 14584 - RNA, 807 nt, synthetic construct
  misc_feature 1..807: note = source = /note="Description of Artificial Sequence: Synthetic coding sequence"
  source 1..807: mol_type = other RNA
atgaagcaaattctacaccccgcattggagaccacagatccttgttcgaccggcttcgtttttcccgccatgacacttttcccagttctattattcctcgtggctggcttgctcccatcttttcctgcaaatgaagacaaagaccccgcattcaccgccctgctcaccacacagactcaggtgcagagggaaatcgtgaataaacataatgagttgcgacgcgccgtatcccctcctgctcgcaatatgctgaaaatggaatggaataaggaagctgctgccaatgcacagaaatgggctaaccaatgcaactatagacacagtaaccctaaagatcgcatgacgtctctgaagtgtggagagaatctgtacatgtcctctgccagcagttcttggtcccaggctattcaatcttggttcgacgagtacaacgattttgatttcggggtggggccgaagacccctaatgctgtggtcgggcattacactcaggttgtttggtattcctcatacctcgttggatgcggaaacgcttactgcccaaatcagaaggtgcttaagtattactatgtatgtcagtattgtcccgccggaaactgggctaaccgtctgtatgttccttacgaacaaggagccccatgcgcatcttgccctgacaactgtgacgacggcctatgcaccaatggctgtaaatatgaagatctatactcaaattgtaagtcccttaaactaactctgacatgtaagcatcagctggtcagagactcctgcaaagcatcctgtaactgcagtaattccatttactag

SEQ ID NO: 14585 - RNA, 372 nt, synthetic construct
  misc_feature 1..372: note = source = /note="Description of Artificial Sequence: Synthetic coding sequence"
  source 1..372: mol_type = other RNA
atgttgccaaaatcaagacgcgcactgactattcaagagattgccgctctcgcccgatcaagtctgcacggcatctcgcaagttgtcaaggaccacgtcacaaaacccacagcaatggcacagggtcgagtcgcccacttgatcgaatggaaaggttggagtaagcccagcgactcacccgctgctttagagagcgctttttcctcatactctgatctgagcgagggggagcaggaagctcgctttgccgctggcgtagcagaacaattcgcgatcgcggaggctaagctcagggcttggtcgagcgtggatggagaagactcaacagatgattcttatgacgaagatttcgctggtggtatggatacttag

SEQ ID NO: 14586 - RNA, 726 nt, synthetic construct
  misc_feature 1..726: note = source = /note="Description of Artificial Sequence: Synthetic coding sequence"
  source 1..726: mol_type = other RNA
atgggagctgttatgggtactttttctagtctgcagaccaagcagaggcggccatcaaaagacaaaatcgaagacgagctcgagatgacgatggtgtgtcacaggcctgaagggctggagcaacttgaagcacagacaaattttaccaagagggagttgcaggttctatatcgcggcttcaagaacgagtgtccctccggggtggttaatgaagacacttttaagcagatctacgcccaatttttcccacacggtgcattgccttgtctggaaggctccccttgcgtggaattccttcccccatctccagccttactcttttgcctcgtcgacgccagtacctatgcacactatttgttcaacgccttcgacacaactcagacaggctccgtcaagtttgaggacttcgtgaccgccctatcgattttacttcgcggcactgttcatgagaaactcaggtggacattcaacctgtatgatattaacaaggatggatatatcaataaggaagagatgatggatatcgtaaaagctatttacgacatgatggggaaatacacttacccagtactgaaggaagatactcccaggcagcacgtagatgtattcttccagaagatggacaaaaacaaggacgggattgtgaccttagatgaatttctcgagagctgccaagaagacgataatatcatgagatcactgcaactctttcagaatgtgatgtag

SEQ ID NO: 14587 - RNA, 630 nt, synthetic construct
  misc_feature 1..630: note = source = /note="Description of Artificial Sequence: Synthetic coding sequence"
  source 1..630: mol_type = other RNA
atgggccccgaggcactgtcatctttgctgttgttgttgttagtggcctctggtgacgccgacatgaaaggacacttcgaccctgcaaagtgccgatatgctctgggaatgcaggataggaccattccagactcagatattagtgcctcctctagttggtccgatagcactgcagcacgccactctagattggagtcaagcgatggggatggggcatggtgtcccgcaggatccgtttttccgaaagaagaagagtacctccaggtggacttacagcgcctacacctggttgcccttgtggggactcaaggaaggcacgcaggtggcctggggaaggaattcagtcgttcctataggcttagatatagcagagatggcagaaggtggatggggtggaaagataggtgggggcaggaagtgatctccgggaatgaagatcccgaaggagtggtactgaaagatttgggacccccaatggttgctcggctggtaaggttctatcccagggccgatagagtgatgtcagtgtgcctgcgggtggaactctatggctgcttatggcgcgacgggctactgtcctatactgcccctgtaggacagaccatgtacctctcagaagcagtctactag

SEQ ID NO: 14588 - RNA, 312 nt, synthetic construct
  misc_feature 1..312: note = source = /note="Description of Artificial Sequence: Synthetic coding sequence"
  source 1..312: mol_type = other RNA
atgagacaacgcctgctgcctagcgtcaccagtctcttacttgtggcgctgctgttcccaggttcatctcaggcaaggcacgttaaccactccgcaaccgaagccctgggagagctgagagagagagcacctgggcaagggaccaacggatttcagctccttagacacgctgtgaaacgtgatcttctccctccgagaacacctccttaccaagttcacataagccaccaggaagccaggggaccttcttttaagatttgcgttggattcctaggacctagatgggcgaggggctgctctacaggtaattag

SEQ ID NO: 14589 - RNA, 426 nt, synthetic construct
  misc_feature 1..426: note = source = /note="Description of Artificial Sequence: Synthetic coding sequence"
  source 1..426: mol_type = other RNA
atgaaaaccggattattttttctttgcttgttaggcacagccgcagcaatacccacaaacgcaagactactctcagatcactccaagccgaccgcagagacagtagctccagacaataccgccataccaagcttgcgtgcagaggccgaggaaaatgaaaaagaaactgctgtttctactgaggatgactcccatcacaaagccgaaaaatccagcgtcctgaagtcaaaagaggagtcccacgagcagagcgccgaacaaggaaaatcgagcagtcaggagctaggcctgaaagaccaggaggatagtgacggccatttgagcgtcaatctggagtatgcacctaccgaggggaccttagacatcaaggaagacatgagtgaaccacaggagaagaaactgagcgagaacacagactttctgtag

SEQ ID NO: 14590 - RNA, 642 nt, synthetic construct
  misc_feature 1..642: note = source = /note="Description of Artificial Sequence: Synthetic coding sequence"
  source 1..642: mol_type = other RNA
atgcgacttgccggtcccttacgcatcgttgtgctagtcgtctccgtgggcgtgacctggatcgtcgtgtcaatcctgctggggggccccggttcaggttttccaagaattcagcagctctttacatcaccggagtcgagtgtgacagccgcgcctagagcaagaaaatacaaatgcggcctcccacagccgtgccccgaagaacaccttgcattccgggtcgttagcggtgcagcaaacgtgatcggacccaagatttgtctcgaggacaaaatgctgatgtctagtgtcaaggacaatgtggggcgtggactgaacattgccctggtgaacgacgtcaacgacctcctaaaatttattagacctctgcacgaagggacactggtatttgtggctagctacgacgatcccgccaccaagatgaatgaagagacgcgaaagctatttagcgaactgggatcccgtaacgcaaaagaactcgcctttagggacagctgggtcttcgtcggcgccaaaggcgtccagaataaatcaccatttgaacagcacgtcaaaaatagtaagcattccaataaatacgagggctggccggaggcgctggagatggaaggatgtataccccgcagatctacggccagctag

SEQ ID NO: 14591 - RNA, 2700 nt, synthetic construct
  misc_feature 1..2700: note = source = /note="Description of Artificial Sequence: Synthetic coding sequence"
  source 1..2700: mol_type = other RNA
atgttattacttctgctgctcgctccactgttcttgaggccacctggtgccggcggcgctcagacaccaaacgctacatcagaagggtgccaaattatccaccccccatgggagggcggcatccggtatagaggcttgacccgggatcaggtaaaagctataaatttcctcccagtggactacgagattgaatacgtgtgcagaggagaaagagaagtcgtcggccctaaagttcgtaagtgtctggcaaacggcagttggaccgacatggatacaccgagccgatgtgtaaaccggacaccccattccgaacgccgggcggtctacattggtgccctttttccaatgagcggaggatggccaggcgggcaagcttgtcagccagcagtggaaatggcactcgaagatgttaacagcaggagggacatactgccggactatgagctaaagctgattcaccacgactctaagtgtgacccaggccaggctactaagtacctatacgagctgctttataacgacccaattaaaattattctcatgccaggatgttcttcagtgtctacactcgtcgccgaggccgctagaatgtggaacttaattgttctgtcatacggttcctcctcacctgctctgtctaatcgccaacgcttcccaacattctttagaacacatccttcagccacactgcacaacccaacaagagtcaagttatttgaaaaatgggggtggaagaaaatcgccactatacaacagactacagaagtcttcactagcactctggacgatttggaagagcgcgttaaggaagctggcatcgagattacatttcggcagtcattctttagtgatccagccgtaccagtaaagaatctgaagcgccaggatgcgagaattatcgtggggctgttttacgagaccgaggccaggaaagtgttttgcgaagtttacaaggaaaggttgtttggaaaaaaatacgtgtggttcctcataggctggtacgctgataactggttcaaaatctacgatccgtcgattaactgcactgtagacgaaatgactgaagctgtcgagggtcacattacgactgagattgtgatgttgaatccggccaatactagaagtatatcaaacatgacatcacaggagtttgttgagaaactcacaaagcgcctgaaaagacatcctgaagagactgggggattccaagaagccccgctggcatacgacgctatctgggcactggcactggccttgaataaaacttcaggagggggtggaaggtctggcgtaagattagaggactttaattacaataatcaaaccattactgatcaaatctatcgtgcaatgaactctagcagcttcgagggggtgtcaggccacgtggtgttcgacgcaagtgggtctcgaatggcctggactctgatcgagcaattacagggcggcagttacaagaaaatcggctactatgactctaccaaggatgatctgtcatggtccaagactgataagtggataggtggctcacctccagcggaccaaacactggtgatcaagacgtttcggtttctctcccaaaagttgttcatctcggtctctgtgttgtcgagtctgggcatcgttctggccgtggtatgtttgtctttcaatatctacaactcgcacgtccgttacatccaaaattcccaacctaacctcaacaatcttacagctgtggggtgctctctcgcccttgccgcggtatttccactgggcctggatggctatcatatcggcagaaaccaatttccctttgtctgtcaagcccgattgtggttattgggcctcggcttttcactgggttacggcagtatgtttaccaagatctggtgggttcacacagtgtttaccaagaaagaggaaaaaaaggagtggagaaaaacacttgaaccatggaagttatacgcaactgtaggtctgctggtggggatggacgtgctgacgctggccatatggcaaatagtggaccctttgcatcgcacaatcgagacgtttgctaaagaggagcccaaagaagatatagacgtttccattctgccccagctcgagcactgctcttctcggaaaatgaatacttggcttggcatattttacggctacaagggattgcttcttcttttgggcatcttcctggcctacgagacaaaatccgtgagcacagaaaagattaatgaccaccgggccgtcgggatggctatatataacgtcgcagttctttgtctcatcactgcgcctgtgactatgatcctttcctcccaacaagacgctgcctttgccttcgcctcacttgccatcgtgttctcatcatacataactctcgtggttttattcgtccctaaaatgaggcgcttgataactcggggcgagtggcaaagcgaggcccaggacactatgaaaaccggcagcagtaccaacaataacgaagaggagaagtctcgtctcctggagaaagagaaccgtgaattagagaagatcatcgcagaaaaggaagaaagagtgagcgaactgagacaccagctgcagtctaggcaacaactgaggtccagaagacatcccccaacacccccagagccgagcggagggcttccacgaggtccaccagaaccacctgataggctttcttgtgatggatctagagtgcatctcctatataagtag

SEQ ID NO: 14592 - RNA, 192 nt, synthetic construct; identical to SEQ ID NO: 12953
  misc_feature 1..192: note = source = /note="Description of Artificial Sequence: Synthetic coding sequence"
  source 1..192: mol_type = other RNA

SEQ ID NO: 14593 - RNA, 489 nt, synthetic construct
  misc_feature 1..489: note = source = /note="Description of Artificial Sequence: Synthetic coding sequence"
  source 1..489: mol_type = other RNA
gacgaagatcgatacaccacttgttggccaaaaacatggcttgcaaaggactgccccgctttaagaattatatccgtggaatacgatacctctctcagtgactggcgcgctcggtgccccatggaaaggaaaagtattgctttccgctctaatgaactgcttagaaaactgagagccgctggtgttggagaccgacccgttgtgtggattagtcatagcatgggcggcctgctagttaaaaaaatgttgttagaagctagtactaagcccgagatgagtaccgtgataaataatacccggggaatcatattttactcggtcccccatcatggatcccgcttagccgagtactcagtaaatataaggtatctgttgtttccaagcctggaggttaaagaactctctaaggggaatacgttctgtcacaaaggaaactggggctatattaacatcagctacaccgaaaagaaaaagaaatttctgccctag

SEQ ID NO: 14594 - RNA, 1083 nt, synthetic construct
  misc_feature 1..1083: note = source = /note="Description of Artificial Sequence: Synthetic coding sequence"
  source 1..1083: mol_type = other RNA
atgccagagttggtggtaactgctctcctcgctccttcaagacttagcctcaaattactgcgggcattcatgtggtccctagtgttcagtgtcgctctcgttgccgccgcggtttacggctgtatagcactgacacacgtactctgtaggcccaggagagggtgctgcggcaggcgtagatccgcatcgcctgcctgtcttagcgaccccagcttaggggagcatggttttttgaatctcaaatcctctggactccggctgcactacgtatccgctggacgcgggaatggacctctgatgttgtttttacatggcttccctgagaattggttctcctggcggtatcagcttcgggaattccagtcccggttccacgtagtcgccgtggatttaaggggatacgggcccagcgatgcccctagagacgtcgattgttataccattgacctgctgctcgttgacataaaagacgtgattctgggtctcggctattcaaagtgtatactcgtcgcccatgattggggggctctcctggcctggcatttctcaatctactacccatctcttgttgaaagaatggtcgttgtcagcggcgctccaatgtcagtctaccaagattattcgctccaccatataagccagttcttcagatcccactacatgttcctgtttcagctaccctggctccctgagaagctgctcagtatgtctgactttcagattttgaagacaaccctcacccatcgcaaaacgggcatcccctgcttgacaccctctgagctcgaagccttcctctataatttctctcagcccggtggactaaccggtccccttaattactaccgcaacttgtttcgcaattttccgctcgagccccaagaactaactactcccaccctgctattgtggggtgaaaaggatacttacttagagcttgggttggttgaggcgataggcagcagattcgtgcctggtagactggaagcccatatcctgcctggaatcggtcattggattccccagtcaaatccacaagaaatgcaccagtatatgtgggcctttctccaggatctgctcgactag

SEQ ID NO: 14595 - RNA, 678 nt, synthetic construct
  misc_feature 1..678: note = source = /note="Description of Artificial Sequence: Synthetic coding sequence"
  source 1..678: mol_type = other RNA
taggcagatctacctagctgttggggagcaggtccttgttatacagggcacaaagtgggagcccttagacgagacaccgtcatatgctgttgtcgccatggtgattattcaaccccctgcctcttcactcctggcaagccttctagaaacccaagtccttggaagcggaccctctggaccctgagtgctccttgggccgggcctgccggatggaccggggaagaacagaacgccaccaagaccggactgattaccagaagaccccggccgctacgacgccggccacaccctgccccagcgagccctctgccagaaatcattagggggaatataccacgcatgctcggcaagtttgtccccgtgaattgggagcccccacagccactgccattccctaaatatttacgctgctacaggtgtctgctcgagacaaaagaattgggctgcctcttagggtccgacatctgccttactcccgccggttcgtcctgcattacacttcacaagaaaaattcctccgggtctgatgttatggttagcgactgcagatcaaaggagcagatgagcgactgttctaatacccgtacttcaccagtaagcggattttggatcttctctcagtattgttttctcgacttttgtaatgacccacagaatagaggcctgtatacaccatag

SEQ ID NO: 14596 - RNA, 192 nt, synthetic construct; identical to SEQ ID NO: 12957
  misc_feature 1..192: note = source = /note="Description of Artificial Sequence: Synthetic coding sequence"
  source 1..192: mol_type = other RNA

SEQ ID NO: 14597 - RNA, 5235 nt, synthetic construct
  misc_feature 1..5235: note = source = /note="Description of Artificial Sequence: Synthetic coding sequence"
  source 1..5235: mol_type = other RNA
atgaggctgctctggggactgatttgggcctcatccttcttcaccctatctctgcagaagccaagattgctgctgtttagcccctccgtcgtgcacctgggcgtccccctatccgtgggagtgcaattacaggatgtcccacgtggccaggttgtcaagggctccgtatttctcagaaaccctagtcgaaacaacgtcccatgtagcccaaaagtggatttcaccctcagctcagaaagagattttgctctactgtcccttcaggtcccactaaaagacgccaaaagctgcggactgcatcaacttcttcgaggcccagaggtccagctggtggcacacagcccatggttaaaggatagcctgtcacgcactactaacatacaaggtattaatttactgttttctagtagaagaggccatctctttctgcaaactgaccagcctatatacaatcctgggcagagagtcaggtacagggtcttcgccctcgaccaaaagatgcgcccaagcacagacacgatcacagtgatggtggagaacagtcatggtctacgagtgcggaaaaaagaggtttacatgccatcttccatcttccaagacgattttgtgatccccgacattagcgaaccaggtacgtggaagatctctgcaaggttcagtgacggcttagaatccaatagttcaacgcagttcgaggtcaaaaaatacgttctccccaatttcgaggtaaagatcacaccaggaaaaccctacattctgactgtcccaggacatcttgacgagatgcagctggacatccaggcacgttatatttacggcaagccagtgcagggcgtggcttatgtgcgcttcggtctgcttgacgaggatggtaaaaagacttttttcagaggattagagtctcagaccaagcttgtcaacggccagtcacacatatcactcagtaaggctgaatttcaggatgctttggaaaagttgaatatgggaataactgacctgcaaggactgcgtttatacgtcgctgccgcaatcattgagtaccctggaggagaaatggaggaagctgaattgacatcatggtactttgtaagctcacccttcagcctggatctgtcgaagacaaaacgtcacctggttcccggggcacccttcctgctgcaggccctcgttcgggaaatgtcaggatctccagccagcgggattcccgttaaggtcagtgctaccgtctcctcacctgggtctgtgcccgaagttcaggatatacagcaaaacactgatggatccggtcaagtatctatccccatcattatcccgcaaactatcagtgaactccagctgtcagtgtctgctggatctccccatcccgctattgcgcgtctgactgtggccgcccctccctccgggggtcccggatttctttccatcgaacgacctgattctagacctcctcgcgtcggcgataccctgaacctgaatctgcgagctgtgggcagcggcgctacgttctcacattattactacatgatactctctaggggtcagattgttttcatgaatcgagagccgaaaagaactctcacatcagtctctgttttcgtcgatcaccacctggcgccgagcttttattttgtggccttttactaccatggcgatcatccagttgccaactcactgcgtgtggatgtgcaagctggggcttgtgaaggaaaactggaactctctgtcgacggtgcaaagcagtataggaatggagagtctgtcaaactgcatttggaaactgactcactagctctcgttgccttaggagcccttgacactgctctttacgcagctggatcaaagtcccataaaccattaaatatgggtaaagtcttcgaggctatgaattcttatgacctggggtgcggaccaggcggaggcgatagtgcacttcaggtatttcaggctgcagggcttgctttctctgatggagaccaatggaccttatcacgcaagcgactgagctgcccaaaagaaaaaaccacacgcaaaaagaggaacgtgaattttcagaaggccattaacgaaaagctgggtcagtacgcttctcctactgctaagcgctgttgccaggacggcgtgacacgtttaccaatgatgagaagctgtgagcagagagcagcaagagttcagcaaccagattgcagagagccatttctctcatgctgccagtttgccgagtcgctgagaaagaagagccgcgacaagggacaagccggactacagagggctctcgagatactgcaagaagaggatctcatagacgaagacgacattcctgttaggtctttctttcctgagaattggctttggcgtgtcgagaccgtagaccgattccagatcctcacattgtggctgcctgattctctgaccacctgggaaatccacggtttatcactgtctaaaaccaaaggcctctgtgttgcaaccccggtacaactgcgagtttttagagagttccatttgcatctgaggctcccgatgtctgtacgcaggtttgaacagctggaactgcgcccagtcctctacaattatctcgataagaatctgaccgtgtctgtgcatgttagtcctgtggaaggcctttgtctcgcaggtggaggagggctcgctcagcaggtgttggtgccggcaggcagtgcacgcccagtcgcgttctctgtggtccctactgccgcagcggctgtatccctgaaggtcgtggctagaggctcatttgagtttcccgtgggcgacgccgtctctaaagtgttacagattgaaaaagaaggcgccatccaccgcgaggagctggtgtacgaattgaacccacttgaccaccgagggcgtactctggagatacctggtaacagcgacccgaatatgattccagatggagattttaactcatacgtgagagtgactgcctccgatcccctcgacacacttggcagcgagggtgctttgtctcctggaggcgtggcatcccttctgaggcttcctagagggtgtggggagcaaaccatgatttatctggcaccaacactggccgcatcccggtatctggacaagaccgagcaatggtcaacactccctcccgaaacaaaggaccacgcagtggacctgatccagaaaggctatatgagaatccaacaatttagaaaggctgatggctcttacgccgcgtggctgtccagaggctcttccacttggctgacggctttcgtgctgaaggttctgagcttggcccaggaacaggtggggggttctcctgagaaactgcaagaaacctcaaactggttgctctcgcaacagcaggccgacggatccttccaagacctgagcccagtaatccatagaagtatgcaaggggggctggtaggcaatgacgagactgtggccctcactgcctttgtcacgattgccttacatcacggcctcgccgtgtttcaggacgagggagctgagccactgaaacaaagagttgaggcgtcaatttctaaggcttcttctttcctcggtgaaaaagccagcgcaggcttactcggagctcatgcagccgctattaccgcctacgccctgactctaacgaaagcccctgccgacctgcgtggagtcgcacataataatttaatggctatggcccaggagaccggagataacttatactgggggtcagtaaccggctctcagtccaacgccgtcagtccgaccccagccccccgcaatccctctgaccctatgccacaagcccctgcactatggattgaaaccacagcatacgctctcctgcacctgctgctacatgaagggaaagccgaaatggcagatcaggctgcagcgtggttgaccagacaaggaagcttccaaggcggatttagatcaacccaggatacagtcattgcgctcgacgctctgtcagcctactggattgcaagccacaccacagaggaacggggtctgaacgtaaccttgagcagcacaggaagaaatgggttcaaaagccacgcgctgcagctgaacaacagacagattaggggcctggaggaagaattacagttctctttagggtccaagattaacgttaaagtgggggggaactctaaggggacactaaaggttctgaggacttacaacgtgttagatatgaaaaatacaacttgccaggatctgcagatcgaagtgactgtgaagggccacgtagagtatactatggaagcgaatgaggattatgaggattatgaatacgatgaactacctgcaaaagacgaccccgacgcaccattgcagccagtgacccctcttcaattattcgaaggtcggagaaatagaaggaggagagaggccccgaaagtggttgaagaacaagaaagtagggtccattacaccgtgtgtatctggcggaatggcaaggtcggcctgtcaggaatggctatcgccgacgtgaccttgctgagcggtttccacgcattgagagcagatctggagaaattgacaagcttgtctgatagatatgtttcacactttgaaaccgagggcccacatgttctcttatactttgattcagtaccgacgtcccgggaatgcgtggggtttgaggcagtccaagaagtccctgttggcctcgtccagcccgcttctgccactctgtacgattactataaccccgagagaagatgcagtgttttttatggcgctcctagcaagtcgcgacttctggcaacactctgtagtgcagaagtatgccaatgtgctgaagggaaatgtccccgtcaaaggagagctctggaacggggcttacaagatgaggacggctacagaatgaagttcgcctgctattaccctagagtggagtatggcttccaagtgaaggttctgcgggaagactccagagccgctttcaggctgtttgaaacaaaaattactcaagtactgcattttactaaagacgtgaaagccgccgcaaatcagatgcgcaatttcctggtgagagcatcatgcaggctacggctggaacccggtaaagaatacctgattatgggattagacggggcaacatatgatctggaaggacatcctcagtatctcctagactccaattcatggatcgaggaaatgccctccgagagactttgccgaagcactagacagagagccgcttgcgcgcagttgaacgactttttacaggaatacggaacacaaggatgtcaggtttag

SEQ ID NO: 14598 - RNA, 792 nt, synthetic construct
  misc_feature 1..792: note = source = /note="Description of Artificial Sequence: Synthetic coding sequence"
  source 1..792: mol_type = other RNA
atggccgacatgcagaatctagtggagaggctggaacgagcagtaggaagattggaggcagtgtcacacactagtgatatgcaccgcggctatgcagactctccatcaaagggcgccgcaccatatgttcaggcatttgattctttgctcgcgggcccagtagctgaatacctcaaaatcagtaaggaaatcggaggcgacgtacagaaacacgcagaaatggtgcacactggcttgaaattggaaagagccctgcttgtgactgcatcacaatgccagcagccagcagagaataaactctcagacctcctcgctccaatctctgaacagattaaagaagtcataacatttcgagaaaaaaataggggttcaaagcttttcaaccatctttccgccgtgtcagaaagcattcaggcgctgggttgggttgccatggcaccgaagccaggaccgtatgtgaaagaaatgaacgacgccgccatgttctatactaatagagtcctgaaggagtataaagatgtggataaaaaacacgtagactgggtcaaggcttacctgtcgatctggacagagttgcaggcctatattaaagaatttcatacaacaggcctcgcgtggtctaagacagggccggttgcaaaagaactcagcggattaccctctgggccaagtgcgggctcttgtcctcctccccctcccccttgtcctccaccacctcccgtcagtacaatctcctgtagttatgaatccgcctcccgctcaagtttattcgctcagatcaaccaaggttag

SEQ ID NO: 14599 - RNA, 501 nt, synthetic construct
  misc_feature 1..501: note = source = /note="Description of Artificial Sequence: Synthetic coding sequence"
  source 1..501: mol_type = other RNA
atgggccctgaggctctgtccagcctgctgttactcctcctcgtggcatcaggtgacgccgacatgaaaggccatttcgaccctgccaagtgccgctacgccctgggaatgcaggataggaccatcccagattctgacatttcagctagctcttcgtggtctgattctactgctgcacggcactctaggttggaaagttctgacggagatggagcgtggtgccctgccggaagcgtgttccctaaagaggaagaatatctccaagttgatctccagcgactgcatcttgtggccctagttggtactcagggacgacatgcaggagggctgggtaaagaattctctcgtagctatcggctacggtattctcgcgatggtagacggtggatgggttggaaagaccggtggggccaagaggtcataagcggcaatgaggatcctgaaggcgtggtgctgaaagatctgggacctcctatggtggctcgccttgtgcgtttttag

SEQ ID NO: 14600 - RNA, 2349 nt, synthetic construct
  misc_feature 1..2349: note = source = /note="Description of Artificial Sequence: Synthetic coding sequence"
  source 1..2349: mol_type = other RNA
tctatcctgagagtagaggctgtagacgcagattgcagcccccagttcagtcaaatttgtagctatgaaatcatcacgcctgacgtaccttttactgtggacaaggatggctacattaaaaacaccgaaaaactcaactatggcaaggaacatcagtacaaactgacggttacagcctacgactgtggaaagaagagagctaccgaagacgtactagtgaaaataagtataaaaccaacgtgcacaccgggttggcagggctggaataatcgcattgaatacgagccgggtactggtgcgctagcggtctttccaaatattcatctagaaacttgtgatgaaccagttgcaagcgtgcaggccacggtcgaactcgagactagtcatatcggaaagggatgtgatcgcgatacctactctgagaagtcactgcataggctttgcggcgctgctgccggaaccgctgagctgctgccatccccctctggctccctcaattggacgatgggcctaccaaccgataatgggcatgactccgaccaggtttttgaatttaacggcacccaggcggtaagaattcctgatggggtggtgtctgtgtcacctaaagaacctttcactatctccgtgtggatgcggcacggccctttcggcagaaaaaaagaaaccattttgtgctcatccgataaaactgatatgaatagacatcactacagcttatacgtgcacggatgtaggctcatttttctatttaggcaagatccttccgaagaaaaaaagtaccgccctgccgaatttcactggaaacttaaccaagtgtgtgatgaagagtggcaccactatgtgctgaacgttgagtttccctccgtgactctctatgtcgacggtacctcccacgaacctttctctgtgacagaggactatccactgcatccatccaaaattgagactcaattagtagttggggcttgctggcaaggcggtgaccttcacatgacccagtttttcagaggtaatttagccgggctcacattgcggtcagggaagctagcagacaaaaaggtgattgactgtctttacacttgtaaagaaggcctggatctgcaagtactcgaggacagcggacggggcgtgcaaatccaagctcatccctctcagctggtgctcacattagaaggggaggatctcggcgaattagacaaagccatgcagcatatttcatacttaaattcgagacaatttcccaccccaggaatcaggagactgaagataacttctaccatcaaatgtttcaacgaagcgacatgcatctccgtgccacctgttgacggttacgtgatggttttacagcccgaggaacctaaaatcagtctttctggagtgcaccatttcgcaagagccgcttctgagttcgaatcttctgaaggtgtgttcttgttccctgagctgcgcatcattagtaccataacccgagaagtagagcctgagggagacggagcagaggatcctaccgttcaggaatcattagtctcagaggagatcgttcacgatttggacacctgtgaggtcacagtagagggagaagaactcaatcacgaacaggaaagtcttgaagtggatatggcccggctgcagcagaaaggaatagaggtctcatcaagcgaattaggtatgacatttactggcgttgacaccatggcaagttatgaagaggtactgcacctattacggtacagaaattggcatgctaggagcctcctcgaccgcaaatttaagctcatttgttctgaacttaatgggagatatatcagcaacgagtttaaggtcgaggttaacgttatccataccgccaaccccatggagcacgcaaatcacatggcagctcaaccacaatttgtgcacccagaacatcgctcgtttgtagatttgtccggccataatctcgccaatccccatcccttcgcagtagtgccctccaccgcaacagtggttatcgtcgtttgtgtaagcttcctcgtgtttatgattatactgggcgttttccgtatccgcgctgcacatcgacggacaatgcgcgaccaggacactgggaaagaaaacgaaatggactgggatgattccgccctgacaataacggtaaaccccatggagacttatgaggaccaacatagctcagaagaagaagaagaggaagaagaagaggaggaaagcgaagacggtgaggaagaagacgacatcacatcagcagaaagtgaatcgagcgaggaggaagagggggagcagggagacccacagaacgctaccaggcagcagcagttagagtgggacgacagcactttgtcctactag

SEQ ID NO: 14601 - RNA, 531 nt, synthetic construct
  misc_feature 1..531: note = source = /note="Description of Artificial Sequence: Synthetic coding sequence"
  source 1..531: mol_type = other RNA
atggcacggagacattgcttctcttactggcttctcgtgtgctggctggtcgttaccgtggccgaagccctctctaccttttatctgcagcagcacatcaatctgcacatggacaaaaagcgttatctgcgactgctggaaatccacaaaatcatgaggactctgcccactgcccgctcgcttcactcacctttacatctgccccgtggagtgcgatctcaaggaccatctcctagccaacgtcaccctggtgtccctagcatattttttcacgaagggcccgagtccatcttaggcttccaaacagacctgagttctttacagggagttaccaccgtatttcatagctcacatttcattggccacaccgttacgctcctcataggtatttcacctgaggaagactctcgcgaagaagcccacctgcgcaaagctgaacgagaggaaaaaccaaagcataccgaagccaagaagtcactctcatttcgtaagaaacagcagaaggatttttgctttatttttcgcaattag

SEQ ID NO: 14602 - RNA, 1182 nt, synthetic construct
  misc_feature 1..1182: note = source = /note="Description of Artificial Sequence: Synthetic coding sequence"
  source 1..1182: mol_type = other RNA
atgcgcaccctgttcaacttactgtggcttgcgcttgcatgctcacccgtccatactacactgtccaagagcgatgcaaagaaagctgcaagcaagaccctgctcgaaaagtcacaattctccgataagcccgttcaggacagaggcctcgtggtaaccgatctgaaagcagagagcgtagttcttgagcaccggtcttattgctccgccaaggccagagatagacactttgcaggagatgtattaggctatgtgactccctggaatagccacgggtacgatgttacaaaggtttttggatcaaaatttactcagatttcgccagtgtggttacaacttaagagaagagggagggaaatgtttgaagtgacaggactccacgatgtggaccaggggtggatgagagctgttagaaaacacgccaaagggcttcacattgtgccacggctgctgttcgaggattggacttatgatgactttcggaatgtgctggattccgaagatgagatcgaggagctgtcaaaaacagtagtgcaagtcgccaagaaccagcatttcgatgggtttgtcgtagaggtttggaaccaactgcttagccagaaacgcgtgggactgattcatatgcttacacatttagcagaagcacttcatcaggcacgcctcctggccttgcttgtgatcccccccgctataactcccggcacggaccagttggggatgtttacccataaagaattcgaacaacttgcccctgtgcttgacgggttttctctgatgacatatgactattcaactgcgcaccaaccgggccctaatgcccctctgtcttgggttcgagcatgcgtccaggttctggacccaaaatctaagtggaggtctaaaatccttttaggtctgaacttttatggcatggactacgccacatccaaagatgccagggaaccagtggtgggcgctcgctatattcaaactctgaaagaccatagaccccgcatggtatgggactcacaggcaagtgaacactttttcgagtataaaaaaagtcgctctggacgtcacgtggtgttttatccaacgttgaaaagcttacaagttagactggaactggcacgagagttgggagtgggggtatctatctgggaactggggcagggactggattatttttatgatctgctgtag

SEQ ID NO: 14603 - RNA, 324 nt, synthetic construct
  misc_feature 1..324: note = source = /note="Description of Artificial Sequence: Synthetic coding sequence"
  source 1..324: mol_type = other RNA
atgctaccctgcctggcactgctattacttatggaactgtcggtgtgcacagtagcaggagacggtggcgaagaacagaccctttcgacggaggctgagacctgggagggagcaggtccgagcattcagctgcagctgcaggaagtaaaaacaggtaaggcaagtcaattctttggcttgatggggaagcgagtcggggggcggccattgatacaacctagacgcaagaaagcgtatcagttggagcataccttccaaggattgctcggtaaacggtcactttttactgaaggacgggaagacgaggctcaaggatcagaatag

SEQ ID NO: 14604 - RNA, 1086 nt, synthetic construct
  misc_feature 1..1086: note = source = /note="Description of Artificial Sequence: Synthetic coding sequence"
  source 1..1086: mol_type = other RNA
atgggaattatccagagcatacttgcgaccagccgggactgttactccttcaaaaagaaacctattcctaagaaaccgacaatgcttgctctagcaaaaatactgctgatctctaccctcttctacagcttattgagcgggtcccacggcaaagaaaatcaagacatcaatactacacagaacatcgcggaggtcttcaaaaccatggaaaacaaaccaatctcgctcgagtcagaagcgaacctaaactccgataaggagaatattacaacatccaatttgaaagctagtcatagcccacccctcaatctacccaacaactcccacgggatcaccgatttcagcagtaacagtagcgctgaacactccctcggctcacttaaaccgacatcgacaatcagcacaagccccccactgatccactcctttgtcagcaaagtcccttggaacgcccctatagcagacgaagatctactacctatctcagcccaccccaatgcaacaccagcactgtcgtccgaaaactttacatggtcccttgtcaatgacacagtcaaaacgccggataactctagtatcaccgtcagtattctgtcctcggaacctacatccccaagcgtaactcccctgattgtagaaccatcaggctggctaaccactaactccgactcatttaccggattcacaccttatcaagaaaagactactcttcagcccacactgaaatttacaaacaattccaagttatttccaaataccagcgatccgcagaaagagaatagaaacacaggtattgttttcggggcaattcttggcgcaatactgggggtctcgttgctgaccctggttgggtatctactgtgtggaaagagaaagaccgattctttctcccatcgacgattgtacgatgatcgaaatgagcccgtattgcgattggataacgctcccgaaccctatgatgtcagctttggtaattcaagttattataaccccacgttgaatgatagcgccatgccagaatccgaagagaacgctcgcgatggaatccctatggatgatattcctcctttaagaacctctgtgtag

SEQ ID NO: 14605 - RNA, 279 nt, synthetic construct; identical to SEQ ID NO: 12966
  misc_feature 1..279: note = source = /note="Description of Artificial Sequence: Synthetic coding sequence"
  source 1..279: mol_type = other RNA

SEQ ID NO: 14606 - RNA, 1125 nt, synthetic construct
  misc_feature 1..1125: note = source = /note="Description of Artificial Sequence: Synthetic coding sequence"
  source 1..1125: mol_type = other RNA
tagcgggtccgacggggccccctaccagctgaccgcccacgcgccctaggccctgctaggcgctgctccagacacccacatcccgctccctttcgcgtctgttccgaaggcgctgctcatagactgaggagacccgaacgcctccctctgcccagcagggccctacggcctcgacccgcacatacccctatcctcggccccgcacccagagcgtgccccggcgcccccagggccagtgacagtccaacctgtgctgccgcggctgctactgcctggccccgcacccgagccgtcgagcgtaaaggctgccaagttgctgctgccgccggcgttcgtggaacaggatgtccctcgagagccgatctggaaaaagatagctggaatgacaccaaagaggacgttttcgtgcatcagacggccatcaagaaaaataaccctagaaaatacttacgcagcgtgggagacggcgagacggtggaattcgatgtggtggagggggagaagggagcagaggctgcaaacgttacggggccggggggtgttcctgtgcagggatcaaaatacgccgctgaccggaatcactatagaaggtaccctcgcaggagaggcccgccccgcaactatcagcagaattaccaaaacagcgagtccggcgagaaaaacgagggttccgagtcggctccggaaggacaagcccaacaaagacgaccgtaccggcgaagacgctttccgccttactatatgagacgcccttatggaagacggccgcagtatagcaacccacctgtgcaaggtgaagtaatggagggagcagataaccaaggagccggagaacagggacgtcccgttcgccagaacatgtacagggggtatcgcccgagatttagaaggggaccccctcgtcagcgccaaccccgagaggatgggaacgaggaggacaaggagaaccagggcgatgaaacgcaaggacaacaaccaccacaacgcagataccgacgcaatttcaactaccgcagacgacgccccgagaaccctaaaccccaggatggaaaggagaccaaggcagcagatcctccagcagagaactcgtccgccccagaggctgagcaaggcggtgccgaatag

SEQ ID NO: 14607 - RNA, 420 nt, synthetic construct
  misc_feature 1..420: note = source = /note="Description of Artificial Sequence: Synthetic coding sequence"
  source 1..420: mol_type = other RNA
atggcattgcggatgttgtgggctgggcaagcaaagggtattcttgggggatggggaattatttgcctggtaatgtctcttctcctacagcacccaggggtgtactccaaatgttactttcaggcacaagccccctgccactacgagggaaagtatttcacccttggcgagtcttggctaagaaaggattgttttcactgtacgtgccttcacccggttggggtgggatgttgcgacacatctcagcaccctattgattttcctgcaggctgcgaggtgaggcaagaggcaggtacctgccagttttcactggtccagaagtccgaccctagactaccctgtaaaggaggcggccctgatcccgagtggggatccgctaacacccccgtgcctggcgcccctgccccacactcttcatag

SEQ ID NO: 14608 - RNA, 462 nt, synthetic construct
  misc_feature 1..462: note = source = /note="Description of Artificial Sequence: Synthetic coding sequence"
  source 1..462: mol_type = other RNA
cattactgcaaagaaggctactatcgggatatgggaaaacccataacacacagaaaggcatgtaaagcctgtgactgccatcctgttggcgccgcaggaaagacctgtaatcagacaactggccagtgcccctgtaaagacggagttacaggtatcacctgcaacagatgcgccaaaggataccagcaatcaagaagcccaatagcaccttgtataaagatacccgtggcgccacctactacagctgctagttccgtggaagaacctgaagcagcacgccaacctaacacatttcaggccgaaggcctgagcctgctgccaggagccgctgagaaggagggtgcgagatgttggggttacaggcgccgcctaggccatagggtagcacaggctgaatgtcgagggccacggtcatgggcttggggaagaattacttcatctttctcgtttgcttccaattag

SEQ ID NO: 14609 - RNA, 213 nt, synthetic construct; identical to SEQ ID NO: 12970
  misc_feature 1..213: note = source = /note="Description of Artificial Sequence: Synthetic coding sequence"
  source 1..213: mol_type = other RNA

SEQ ID NO: 14610 - RNA, 567 nt, synthetic construct
  misc_feature 1..567: note = source = /note="Description of Artificial Sequence: Synthetic coding sequence"
  source 1..567: mol_type = other RNA
atgtttcatcaaatctgggcagctctgctctacttctacggtattattctgaactccatttatcaatgcccagaacacagccaactaacaacgctcggcgttgacggcaaggagtttcctgaggtacatctcggccagtggtatttcatcgctggagccgccccgacaaaagaggaactggctacatttgaccctgttgacaatatcgtcttcaacatggcggccggaagtgccccaatgcagttacacctcagagcaactattcgcatgaaagatggcctctgtgtgccccgcaaatggatttaccatcttacagaaggatctactgacctcagaacagaaggcaggccagacatgaaaacggaactgttcagttcaagttgtccaggcggtattatgcttaacgaaaccggccagggctatcagagatttctgctgtacaaccgctccccccaccccccagaaaaatgcgtcgaagagtttaaatctcttaccagctgcttagactcaaaggcttttctactgacccctagaaaccaggaggcctgcgaattgtcaaacaattag

SEQ ID NO: 14611 - RNA, 2316 nt, synthetic construct
  misc_feature 1..2316: note = source = /note="Description of Artificial Sequence: Synthetic coding sequence"
  source 1..2316: mol_type = other RNA
atgggatggttgaccagaatcgtgtgtttattctggggagttctattgacggcccgagcaaactatcagaacggcaaaaacaacgtgccgagattaaaactcagttataaggagatgttggaaagcaataatgtgataacctttaacggactggcaaattcaagctcataccacaccttccttctcgatgaggagagatcaaggctgtatgttggagccaaagatcacatatttagcttcgacctcgtgaacatcaaagattttcaaaaaattgtttggcctgtatcctacacccgacgagatgaatgcaagtgggctggaaaagacattctgaaagaatgcgcaaatttcataaaggttctgaaggcttacaatcaaacccacctgtacgcttgcggtactggcgcttttcatccaatctgcacctatattgaaataggccatcacccagaggataacatctttaagctggaaaattcgcacttcgaaaacggtagaggcaagtctccctacgacccaaagcttcttactgcatcccttctcattgatggcgaactctactccggcactgctgcggactttatgggccgggactttgctatttttcgaacacttgggcaccaccaccctatcaggaccgaacaacacgactcccggtggctcaacgaccctaaattcatttcagctcatctgatttccgagtccgacaatccagaagacgacaaggtttattttttttttcgtgagaatgccatagatggagagcacagcggcaaggctacacatgctaggataggacaaatctgtaagaatgattttggagggcaccgctctctcgtcaataaatggaccaccttcttaaaagccagactcatctgctctgtgccaggccccaatggcattgacactcacttcgacgaattacaggacgtcttccttatgaattttaaggatccaaaaaaccccgtcgtttatggtgtgtttacaacaagcagtaacatatttaaagggtctgccgtatgcatgtatagcatgtctgacgtccggagggttttcctcggaccctacgcacacagagatggcccaaactaccaatgggttccctaccaaggtcgggttccctaccccaggcctggaacctgtcccagcaagactttcggcggcttcgactctacaaaagacttgcccgatgatgtaattaccttcgctcgatctcaccccgccatgtacaaccctgttttcccaatgaataaccggcccatagtgatcaagacagacgtaaactatcagttcactcaaatagtggtagacagggtggacgcagaggacggtcaatacgatgtgatgtttattggtaccgatgttgggacagtactgaaggttgtgtctattcctaaggaaacctggtacgacctggaagaagtgctactggaagagatgacggtgtttagggaacccaccgcaatatcagcgatggagctttctactaaacaacagcaattatacatagggagtactgctggtgtagcccagctaccactgcacagatgcgacatctacgggaaagcatgcgcagagtgttgtctcgcccgtgatccatattgcgcatgggacggcagtgcatgttcaagatactttcctactgccaagcgtcgtacgagaagacaagacataagaaacggcgacccactgactcactgtagcgacttgcaccacgataatcaccacggacatagcccagaggagaggattatttatggcgtagaaaactcgagcacctttctggagtgttcccctaaatcccaaagagctctcgtgtattggcaatttcagaggaggaacgaagaacggaaagaggagattcgcgtcgacgaccacattatccgtacagatcagggtctacttctaaggagtctgcaacaaaaagatagtgggaactatctgtgccacgccgtcgaacatggattcatccagacactgctgaaagtcacgttggaggtgattgacactgaacatttagaagagttgctccacaaagacgatgatggggacggcagtaagaccaaagagatgagcaattctatgaccccgtcacaaaaggtttggtaccgcgattttatgcagttaattaatcacccaaacttaaacacaatggacgaattttgtgaacaggtgtggaagagagatagaaaacagaggagacaaaggccaggacatacccccggaaacagcaataagtggaagcatcttcaggaaaataagaaaggaagaaaccgtcgcacacacgagtttgagcgcgcaccaagaagcgtgtag

SEQ ID NO: 14612 - RNA, 1014 nt, synthetic construct
  misc_feature 1..1014: note = source = /note="Description of Artificial Sequence: Synthetic coding sequence"
  source 1..1014: mol_type = other RNA
atggcgcgaccaatgatcaaggaagccagaatggccagccttctgcttgaaaatccatattacggatgccggaaacccaaggatcaggtaagaagctccctgaaaaatgtgtccgatctgttcgtgatggggggcgcattggttctggagtccgcagcattactgcattggctggagcgggaagggtacgggccgttgggcatgactggaatcagtatggggggacatatggcttcactcgccgtctcaaattggcctaaaccaatgccactaatcccctgtttgagctggagtactgcttcaggagtcttcacaaccggcgttttgtccaagagcattaactggcgagaactggaaaaacaatattacactcaaacggtatatgaagaggagatcatacatatgttggagtattgtggaaccgacagcttcaagatgggccaggagttcgtgaagcactttacttctagcgccgacaaactgacaaatttgaacctagtgtctcgaacgctgaatctcgatatcagtaatcaggtcgtgtcacagaaacctgccgactgtcataatagcagcaaaacctccgtttccgcaacgtcagaaggccttctcttgcaggacacaagtaagatgaaacgttttaaccagacactgtcaactaacaaatccggttacaccagccgcaatcctcagtcctaccacctactcagcaaagaacagtctcgaaattcactcaggaaagagagtcttatttttatgaaaggagtgatggacgaatgtactcatgtcgctaacttttccgtccctgtcgacccatcactgattatcgtcgtacaagctaaggaagacgcctacattccaaggaccggcgtgcgctcactgcaggaaatatggcccggctgcgagatcagataccttgaaggcggccacattagcgcgtatctgttcaagcagggtttattcagacaggctatctacgatgcattcgaccgcttcttacacaagtacgccaattag

SEQ ID NO: 14613 - RNA, 462 nt, synthetic construct
  misc_feature 1..462: note = source = /note="Description of Artificial Sequence: Synthetic coding sequence"
  source 1..462: mol_type = other RNA
atgggacccgaagcactaagttccctgctcctcttgctgttggtggcctctggtgatgcagatatgaagggacatttcgaccctgccaaatgcagatatgccttggggatgcaggacaggacaatccctgatagtgatatatcagcaagttcgagctggagtgactcaaccgccgcccgccattcacgcctggaaagctccgacggtgacggcgcttggtgcccagctggatctgtgttcccaaaagaggaagagtacctacaggttgacctccagagactccatctcgtcgctcttgtgggcacccaaggccggcacgccggggggttaggtaaggagtttagtcgatcttacagactacggtacagcagggacggtcggcgatggatgggatggaaggacaggtgggggcaagaagtaatctcagggaatgaagatcctgaaggggtggttttgaaatag

SEQ ID NO: 14614 - RNA, 345 nt, synthetic construct
  misc_feature 1..345: note = source = /note="Description of Artificial Sequence: Synthetic coding sequence"
  source 1..345: mol_type = other RNA
atggacaagtcactactgctggaactccctatcttactctgctgctttagagccctgagcggctccttgtcaatgagaaacgacgctgtgattgaaatagtacaatgtagaatgtgccacctgcagtttcctggagagaagtgttcccggggcagaggaatttgcactgccacaaccgaggaggcctgcatggttgggagaatgttcaagagagacggtaacccatggctaacattcatgggatgtttaaagaactgcgccgatgtgaaagggatacgatggtcagtttatctggtgaacttcagatgctgccgaagccatgatttatgtaatgaagatttgtag

SEQ ID NO: 14615 - RNA, 630 nt, synthetic construct
  misc_feature 1..630: note = source = /note="Description of Artificial Sequence: Synthetic coding sequence"
  source 1..630: mol_type = other RNA
atgggacccgaagccttgagctctctgctactgttgctcctagtcgcgtctggagacgcagacatgaagggccattttgaccccgccaagtgtcgatatgcccttggaatgcaagataggacaattccagattccgacatttcagcgtctagctcttggtctgactcgactgccgcacggcacagccggcttgaaagtagcgacggggacggtgcctggtgtccggcaggatctgtgtttcccaaagaagaagaatatctgcaggtcgaccttcagcgcctgcatctggtggccctagtggggacgcaaggccgacacgccggaggactcggaaaagaattctctcgatcttataggcttcgatattcacgggatggcagaagatggatgggatggaaagataggtgggggcaggaagtaatctctggtaatgaggacccagagggtgttgtcctgaaagatcttgggcctcccatggttgcacggctggtgcgcttctatcctcgcgccgatagagttatgagcgtgtgtctgagagtggaattgtacggctgcctttggcgcgacggtctgttgagttacacagctcctgtcggacagacaatgtacctatccgaagctgtctattag

SEQ ID NO: 14616 - RNA, 639 nt, synthetic construct
  misc_feature 1..639: note = source = /note="Description of Artificial Sequence: Synthetic coding sequence"
  source 1..639: mol_type = other RNA
gattttggatactgcccgcgagtttattgtgaaaaccaacccatgcttcctatcggtgtgcttgtgatggtcggctttacggtaggaaaggttcctgtaccggatattcgcacctgccatttttgtctggtggaagatccctctgtgggctgcatctctggcagtgagaaatgcacaatttcctccagtagtctgtgtatggttattactatttattacgacgtgaaggttcgctttattgtcaggggctgcggtcaatacataagttatcgttgtcaagagaaaagaaatacttattttgcagagtattggtatcaggcccagtgctgtcaatacgattactgcaattcatggtcctcccctcagttacagtcttccctgcctgagccccacgatcgacccctggcgctccccctttcagattctcaaatccaatggttctatcaagccctcaatctctccctgcccctccctaatttccatgccggcaccgaaccagacggcctggatcccatggtcactctctccctgaatctggggctgtcatttgccgaacttaggcgaatgtatctgttcctgaacagctctggactcctggtcctgccacaagccggattgctgaccccccacccgtcatag

SEQ ID NO: 14617 - RNA, 240 nt, synthetic construct; identical to SEQ ID NO: 12978
  misc_feature 1..240: note = source = /note="Description of Artificial Sequence: Synthetic coding sequence"
  source 1..240: mol_type = other RNA

SEQ ID NO: 14618 - RNA, 1620 nt, synthetic construct
  misc_feature 1..1620: note = source = /note="Description of Artificial Sequence: Synthetic coding sequence"
  source 1..1620: mol_type = other RNA
atgagcgagccacaggaaaagaaactaagcgagaacactgactttttagctcccggcgtgagtagcttcacagacagcaaccaacaggagtccatcacaaaaagggaggaaaatcaggagcaacccaggaattacagtcaccatcagcttaataggtcgagcaagcactcacaggggctgagggatcaaggcaatcaggagcaggacccaaatattagcaatggcgaagaggaggaggaaaaagaacccggtgaagtaggcacacacaacgataatcaggagcggaaaactgagttgcctcgagaacatgcaaacagcaaacaagaagaggacaacactcagtctgacgacatcctggaggagtccgatcagccaacacaagtgtcgaagatgcaagaagacgagtttgatcagggtaatcaggagcaagaggacaattcaaatgcggaaatggaggaggaaaacgccagtaacgttaataaacacattcaggaaacagagtggcaatcacaggaggggaaaaccggactagaggccattagcaaccacaaggaaaccgaagaaaagaccgtaagcgaggctttactcatggaaccaactgacgacggcaataccacacctagaaatcacggcgtagacgatgacggggatgatgatggagatgacggaggcacagacggcccaagacactctgcgtctgatgattattttatccctagtcaggcgtttcttgaagccgaaagagcccagtccatcgcgtatcatctgaaaattgaggaacaacgggagaaagtgcatgaaaatgagaatataggaaccacagagcctggagaacatcaggaagccaaaaaggctgagaacagcagcaacgaagaagagacgagctctgaaggcaacatgcgcgtccacgcagttgattcctgcatgagcttccagtgtaagcgtggtcacatctgcaaagcggatcaacaagggaagccccactgcgtatgccaggacccagttacctgccctccaaccaaaccgctcgaccaggtttgcggaaccgacaaccaaacctacgcctcatcatgccatctatttgccacaaagtgcaggctggaaggaacaaagaaaggccatcagctgcaattggactatttcggcgcatgcaaatctatacctacttgcacggactttgaggtgatacagtttccattgcgcatgagagactggttgaagaacatacttatgcagttatacgaggcgaattctgaacatgctgggtacctaaatgaaaagcaacgcaacaaggtgaagaagatctatctggacgaaaaacggttactggcaggggaccatccaatcgaccttctgctgcgagatttcaagaaaaactatcacatgtacgtgtaccccgtccattggcagttctccgagcttgaccaacatcccatggatcgagtactgacccactccgaactcgccccactgagagcaagtctagttccaatggagcactgtatcactagattctttgaggaatgcgatccaaataaagacaaacacatcactctgaaagaatggggacactgttttggtattaaggaggaggacattgatgagaacctgctgttttag

SEQ ID NO: 14619 - RNA, 2535 nt, synthetic construct
  misc_feature 1..2535: note = source = /note="Description of Artificial Sequence: Synthetic coding sequence"
  source 1..2535: mol_type = other RNA
atgggacccggtgcccccttcgcccgcgttgggtggcccctgcctctgctggtcgtgatggctgcaggagtcgctcccgtgtgggcctcccattctcctcatctgccccgccctcacagccgagtcccacctcatccgtcaagcgagagacgggcggtttatattggtgccctgttccccatgtcgggcggatggcccggtggtcaggcttgtcaacccgcagtcgagatggccctagaagacgttaactccaggcgcgatatccttcccgattacgaactgaagctgatacaccatgacagcaaatgcgaccctggtcaagcaacaaaatatctttacgagctactgtacaacgatcctatcaaaattatcctgatgccgggctgcagctccgtgagtactctagtcgccgaagccgcaagaatgtggaatctgatcgtccttagttatggcagcagttctcccgctttatctaatagacagcgtttccccacctttttccggacacacccatctgcaactttgcataatcccacacgcgtgaagctcttcgagaagtggggctggaaaaaaatcgcaaccattcaacagactacggaggtattcacttcaacactcgacgacctcgaggaacgagtcaaggaggctgggatcgaaatcacctttaggcaatcattcttcagtgacccagcagttcctgtaaaaaacctgaagagacaagacgcgcggattattgtaggcctgttttatgagaccgaggccagaaaggtattctgtgaagtgtacaaagagagactgttcggaaaaaagtacgtgtggttcctgatcggatggtatgcagacaactggtttaagatctatgatccctcaatcaattgtacagtagatgaaatgaccgaagccgtcgagggccatataacgaccgaaatagtcatgctaaaccctgcaaataccagaagcatttcaaatatgacgagtcaagaatttgtcgagaagttaacaaagcgactgaagagacatcccgaggagactggtggcttccaagaagcgcccttagcctatgacgcaatctgggcacttgccctagccttgaataagacttctggtgggggaggtagaagcggggtgcgcctggaagatttcaactataataaccagacaatcacagaccagatatacagagcaatgaactctagctcctttgagggtgtcagtggtcatgtggtgttcgacgcttcgggatctaggatggcctggactctaatagaacaactgcaggggggttcttataagaagattggttactatgattcaactaaggacgatctctcttggtcgaagacagataaatggatcggaggctcaccacccgctgaccagactcttgtgattaagacctttagattcttgtcgcaaaaactgttcatctcagtcagcgtgttgtcttccttgggcatcgtgctcgccgtcgtgtgcttaagctttaatatttataactcccacgtgaggtatatccaaaatagtcaaccaaatctcaataatctcacagcagttggttgttccttagcgttggctgctgtgttccccctaggattagacgggtaccatatcggaaggaatcagttcccatttgtttgccaggctcggttatggctgctcggacttggcttttcactcggctacggctctatgttcaccaagatctggtgggttcacacagtgtttaccaagaaagaggaaaagaaagagtggagaaaaactctcgaaccatggaaattgtatgccacggtgggcctgctggtgggaatggatgtcctgacactggctatttggcagattgtggaccccctgcacagaacaatcgagacatttgcaaaggaggaacctaaagaggatatcgacgtcagcattctgcctcagcttgaacactgctcctcacgtaagatgaatacctggctgggaatcttctacggttacaaaggactactgctccttctgggaatctttctagcttacgaaaccaagagtgtgagtactgagaaaattaacgaccatagggctgttggcatggcaatctacaatgtggcggtgctttgtttgattacggctcctgttaccatgatcctctccagccagcaggacgcagcctttgcctttgcctccctcgccattgttttttcttcctacatcactttagttgtgctgttcgtacccaagatgcgccgacttatcacaaggggagaatggcaaagcgaagcccaggacacaatgaagactggctcatccaccaataataacgaagaagaaaagagtagactgttagagaaggaaaatagagagttagagaagattatagcagaaaaagaagagcgcgtttccgaattgcgacaccagcttcagtcgcgccaacaactaagatcaaggagacacccaccaaccccgccagagccctcaggtggactccccaggggccctcccgaaccccccgacagactttcctgcgatggtagccgagtgcatttgctatataaatag

SEQ ID NO: 14620 - RNA, 993 nt, synthetic construct
  misc_feature 1..993: note = source = /note="Description of Artificial Sequence: Synthetic coding sequence"
  source 1..993: mol_type = other RNA
atgcagctgttcctgttgctgtgtcttgtattactgtctcctcaaggggcaagcctccatagacaccatcctagagagatgaaaaagagagtcgaggatcttcatgttggggctacagtcgccccttctagccgccgcgatttcacgttcgacctgctcggcaatgccctgtttactgatctcgtcgttgacttgcaagacactttcgtttctgccatgaagaccctttacctagccgacactttccccaccaactttcgcgattctgcaggagctatgaagcagataaatgattacgttgctaagcaaacaaagggaaagatcgtagatctgttaaagaacctggactccaatgcggtagttatcatggtcaattatatcttttttaaggctaagtgggagacgtcattcaaccacaaaggtacccaagagcaggatttctatgtcacttcagagacagtggtgcgagtcccaatgatgagccgcgaagaccaatatcactacctattagatcgcaatctatcgtgtagagttgtaggggttccatatcaagggaacgctaccgcactatttatactgccgagcgaaggaaagatgcagcaagtggagaacggtctgtccgagaaaaccctccgcaaatggctcaaaatgtttaagaagcgccaactagagttatacctgccaaaattttctatcgaaggctcctaccagctagagaaggttctgcctagcctggggattagtaatgtgttcacatcacacgccgaccttagcggcatctccaatcacagcaacattcaggtcagcgaaatggtccataaagctgtagttgaggttgacgagagcgggacaagggccgcggccgcaacaggcaccatatttacattcagatcggcaaggcttaacagccaacgactcgtgttcaataggccatttctgatgtttattgtggataataatatcttatttctgggaaaagtcaaccgaccatag

SEQ ID NO: 14621 - RNA, 2676 nt, synthetic construct
  misc_feature 1..2676: note = source = /note="Description of Artificial Sequence: Synthetic coding sequence"
  source 1..2676: mol_type = other RNA
atgctgccaaccgaggttccacagagccatcccggcccttctgcgctgctccttttgcaattgctgctgcctcccacatccgcatttttccctaacatctggtccctgctagcagcacccggctccattacacaccaggatttgactgaggaggctgccctgaacgtgactctacagctgttcctcgaacagcccccacctggacgccccccactacgactagaagatttcctgggacgcaccctgttggccgacgatttgtttgctgcgtattttggccctggctcatctcgcagatttcgcgcagcgttaggagaggtgtctcgggctaacgctgcacaagattttttgccaacttctaggaacgacccagatttacacttcgacgcagaaaggttagggcaaggaagagctagacttgtgggagctttgcgtgaaaccgtggtcgccgcccgggcactggatcataccttagcccgacagagattgggcgctgccttgcacgcactgcaggacttctactcacacagtaattgggtggagcttggggaacagcaacctcatccacacctactatggccacggcaggagcttcaaaatctggctcaggtggccgaccccacctgctccgattgtgaagaactgtcttgccctaggaactggctcggcttcacacttctgacctcaggctattttggtacacatcctcctaagcctccaggaaagtgctctcacggcgggcactttgaccgatcaagctctcagcctcctagaggagggattaacaaggactcgacctcgcccggtttttccccacaccatatgcttcacctgcaggccgctaaattagcattactcgcgtccatccaggctttctccttgttgcgtagcagactcggcgatagagattttagtcgcctacttgacatcactcccgctagcagcctgagctttgtgctggatacaacaggaagtatgggtgaagagattaacgccgccaaaattcaggcccgtcatctagtcgagcagaggcgcggcagtcccatggaaccagttcactacgtacttgttccgttccacgatcctggattcggacccgtcttcactacatccgaccccgactcattttggcagcagttaaatgaaattcatgctctcggcggaggcgacgagcctgagatgtgcttgagcgctttacagctggccctacttcacacacctccactgtcggacatctttgtgtttactgacgctagccccaaggacgcttttcttactaatcaagtggaatctttaacccaggaacgtcggtgtagagtgacatttctcgtgaccgaggataccagtcgcgtgcaaggccgggcaaggcgagaaatcctatcccccctgcgcttcgagccatacaaagcggtcgccctagcctccggcggtgaggtcatctttacaaaagaccaacacatcagagatgtggccgcaattgtcggtgagtccatggcagctctggttaccctgcccctcgacccgcccgtggtcgttcctggccagcctctcgtgttctcagtggatggactgcttcagaagattaccgtgaggattcacggagatatatcctctttctggattaaaaaccctgcaggcgtgtctcagggacaggaagaaggaggtggcccactcggccatactcggcgatttggacaattttggatggtcacgatggacgacccccctcaaacaggcacttgggaaatacaagtcaccgccgaagacactcctggtgtacgagttcaggcccaaacttccctcgatttccttttccactttggtattcccatggaagacggcccacacccaggactttatcccttaactcaacctgttgctggcctgcagacccagttgttggtggaagtaactggccttggctctagggccaatccaggagatccacagccacacttttcacatgtgattcttagaggtgtccctgaaggcgcagaactcggccaggtacctctggagccagttgggccgccagagaggggcctgctcgcggcatcactgagtcctactcttctttctaccccccgaccattcagtctcgaactgatcggccaggacgccgctggacgccgcctgcatagagccgcacctcagcctagcactgtggttcccgtgttattggaactgtctgggccttcagggtttttggcccccggatccaaagtcccgctctcattaaggatcgcctctttctctggaccccaggacttagacctcagaacgttcgtgaatccaagcttcagtttaacaagtaatctctcccgtgcgcacttggaattgaatgagtctgcatggggccggctgtggcttgaagtacctgattcagctgcccccgacagcgtcgtcatggtgacagttactgccggcggtcgcgaagctaatccggtgccgccaactcatgcttttttgaggctgcttgtctccgctccagctccccaggatagacataccacaccaaccggctcctctgatcctattttgaccacagctactccagctttctcaccttttaccctggtgactcagggcagggcaggcgcaggcctcgctgctggaagtccctggtggggaaccgtcggcggagtgttactcctcctcggccttgcttcctggtag

SEQ ID NO: 14622 - RNA, 708 nt, synthetic construct
  misc_feature 1..708: note = source = /note="Description of Artificial Sequence: Synthetic coding sequence"
  source 1..708: mol_type = other RNA
atgaagtacgtattttacctgggggtgctcgctggcactttcttctttgccgactcaagtgtacagaaagaagatcccgcgccatacctggtttacctgaagagtcatttcaacccctgcgtcggtgtgctcattaagcctagctgggtcctcgctcccgcccattgttaccttccaaaccttaaagtgatgttaggaaatttcaagagtagagtacgagacgggacagaacagacaattaaccccattcaaattgttagatactggaattacagccactctgcgccacaagacgacttaatgctcatcaagctggccaaacccgcaatgctcaatccaaaagtccaaccccttaccctggctacgactaatgttcgtccgggtacggtctgcttgctgtcaggactggactggtctcaggaaaattcaggacgacatccagatttgcgccagaatctcgaagcaccggtcatgagcgatcgcgaatgtcaaaagacagaacaaggaaagagtcacagaaattctctttgtgttaagtttgtcaaggtcttctctcggatctttggtgaggtggctgtggcaaccgtcatttgcaaggataaactgcagggcattgaagttggacactttatgggaggtgatgttggaatttacactaatgtttataagtacgtgtcatggatagaaaacacggccaaggataaatag

SEQ ID NO: 14623 - RNA, 1386 nt, synthetic construct
  misc_feature 1..1386: note = source = /note="Description of Artificial Sequence: Synthetic coding sequence"
  source 1..1386: mol_type = other RNA
atgtcactggacattcaatcattagatatacaatgcgaagagctttctgacgctagatgggctgaactgctcccattattgcagcaatgccaggtggtgaggctcgacgactgtggcttaacggaggctcgttgtaaggacatctcatccgctttgagagtgaatcctgcgctggcagagctgaacctgcgatctaatgaactcggggatgtcggtgtacattgtgtgttacaagggcttcagaccccatcctgcaaaattcaaaagctgtctctgcaaaactgttgcttgactggtgccggatgcggcgtcctgtcaagcaccctccgcacgctgcctactctgcaggaattgcacttatctgacaatctgctgggtgatgccgggctgcaactgctatgtgaaggactgctagatccacaatgcaggctcgagaagctccagttagagtactgttccctctcagccgcttcttgtgagccgctcgccagcgtcctccgcgcaaaacccgatttcaaagagctgaccgtttccaataatgacattaacgaggccggggtaagagtcctctgtcagggcctgaaagactctccctgtcagctggaggccctcaagctggaatcttgtggggtgacatcagacaattgtagggatttgtgcggaatcgtggccagcaaggcaagcctccgagaactggccctgggatccaataagctgggagacgtaggtatggccgagttatgccctggactgttgcacccaagctctagattgagaaccttgtggatatgggaatgtggaattacagctaaaggttgtggagatctgtgcagagtacttcgcgctaaggagtctctcaaagagctgtcactggccggtaacgagttgggggacgaaggggcccggttactctgtgaaacactcctcgaaccaggatgtcaattagagagtttgtgggtgaagtcctgctcctttaccgcagcttgttgttctcacttttctagtgtgcttgcgcaaaaccgtttcctattagagctccagatctcaaacaacaggttagaagacgccggggtccgggagctgtgtcaaggtttggggcagcccgggagtgtactgcgagtgctctggcttgccgactgtgacgtgtctgactctagctgttcttccctagctgcaactctgcttgcaaaccattcccttagagaattggatctgagtaataattgtctaggagatgcggggattctgcaactggtggagtcagtacgtcagcctgggtgcttattggaacagctcgtgctctatgatatatactggagcgaagaaatggaagatcgtctacaagcactggagaaggataagcccagcctgcgtgtaatttcatag

SEQ ID NO: 14624 - RNA, 2676 nt, synthetic construct
  misc_feature 1..2676: note = source = /note="Description of Artificial Sequence: Synthetic coding sequence"
  source 1..2676: mol_type = other RNA
atgctacccaccgaggtcccacagagtcatcctgggccgtctgcgctgctactgctgcaactcctgctaccccccaccagtgccttcttccctaacatatggtcattactggctgcaccgggatccataacacaccaggacctcacagaggaagccgcattgaacgttacattacaactattcctcgaacaaccccccccagggcgccctcctctccgacttgaagactttctgggcaggactcttctggccgacgatctctttgccgcttactttggccccggaagttcccgcaggttccgggcagctctcggggaagtatcaagagcgaacgccgcccaggatttcctccccacatcccgaaacgacccggacctgcactttgacgctgagcgactgggacagggccgtgcccgactggtcggcgctttgagggagaccgttgtagccgcacgggccctcgatcacacactggcacggcagaggttaggtgccgccttgcacgccctccaggatttttattctcattccaactgggtggaactcggtgaacaacagcctcacccacacctgctttggccccggcaagaactccaaaatctggcccaggtcgccgatcccacttgttctgactgtgaagaattaagctgtcctcgcaattggctcggctttaccctcctgacctctggctactttggcacccaccccccaaaacccccaggcaaatgttcacacggaggacactttgatcgatcttcatcccagccgccacgtggaggcattaataaagactccacttcacccggcttctcccctcaccacatgctacacttgcaagccgctaagttggcactcctcgcttccatccaggcattctccctgctgcggtctcgtttaggggatagagacttttctcggctgctagatattacacctgcatccagcttgtccttcgtcctcgataccacaggctcaatgggggaggaaatcaatgccgctaaaatacaagcccgccaccttgtcgagcaacgccgcggtagcccaatggaacccgtccattacgttctcgttccctttcatgaccccggttttggacccgttttcaccacctcagacccagatagtttctggcagcaattaaacgaaatccacgcactgggtgggggagatgaacctgagatgtgcctgtcagctctacagctggccctcctccacacacctccactatccgatatttttgtcttcacagacgcctcacccaaagatgcctttctgacaaaccaggtcgagagcttaacccaggagagaaggtgtcgcgtcacattcctggttaccgaggacacctccagagtgcagggccgtgcccgccgggagatcctctcaccactgcgatttgaaccctacaaagccgtggcactggcatcaggcggagaagtaatttttactaaagatcaacacatccgggatgtcgcagcaattgtgggtgaaagcatggcagcactggtcactttacctctcgatcctcccgttgtcgtgcccggccagcctctagttttcagtgttgacgggctcctgcagaagattactgtgagaatccatggggacatcagttctttctggataaaaaacccagctggagttagccagggccaggaagaaggaggaggcccacttggacacacacggagatttgggcaattctggatggtgaccatggacgaccctccgcaaaccggcacttgggagattcaagttactgcagaggatacaccaggcgtacgcgtccaagcccagacttccctcgacttcctgtttcattttggaattccaatggaagacggccctcatccaggactctatcccttgacacaacccgtggccggattacagacacaacttctggttgaggtgacaggcttgggcagcagagcgaaccccggagacccacaaccccatttttctcatgtcatccttaggggagttcccgaaggggcggagctgggacaggtgccgctggaaccggtgggccctcctgaaaggggactgttggcagcatccctgagtcccacacttctaagcactccaagaccattctcactggagctaatagggcaagacgcagcaggacgacgattgcatagagctgcgcctcaaccatctacagttgttcccgtgcttctcgaactgagtgggccttctggattcctcgcccccggttcaaaagtgcctctgagcctgcgtatagcttcattctccgggcctcaagaccttgacctcaggacattcgtcaatcccagctttagcttaacttccaacctctctcgcgcccacctggagttaaacgagagcgcctggggcagactgtggctggaagttccggacagcgctgctccggactctgtggtcatggtcaccgtcactgctgggggacgagaagccaatccagtgccccccactcatgcctttctgcggttactggtttcggcccctgcacctcaggaccgccacacaacacctaccggcagctccgaccccatcctcactaccgctacccccgctttcagtccatttactctcgtaacccagggccgagcaggtgccggtctagcggcaggatctccttggtggggcaccgtagggggcgttctattactgctgggcttagctagctggtag

SEQ ID NO: 14625 - RNA, 501 nt, synthetic construct
  misc_feature 1..501: note = source = /note="Description of Artificial Sequence: Synthetic coding sequence"
  source 1..501: mol_type = other RNA
atgggcccagaagcactctcatccctgctgctgttattattggtcgcaagcggcgacgccgatatgaagggacactttgaccctgccaaatgtaggtacgctttagggatgcaagaccgtacgattccagactcagacattagtgcctctagttcttggagtgatagtacagcggctcgccactcacggctggagtcatccgacggagatggtgcatggtgtcccgccggcagcgtgtttcctaaagaggaagaataccttcaggtcgatttgcagagactccatttagtggctctggtcggcacacaaggcagacacgccggaggtttaggaaaagaattttctcgcagctaccgactgcgttatagtcgtgacggacggcgatggatgggatggaaggatcgttggggccaggaagtcatttcagggaacgaagacccagaaggagttgtgttgaaggatctagggcctcccatggtggctagattggtacgcttctag

SEQ ID NO: 14626 - RNA, 420 nt, synthetic construct
  misc_feature 1..420: note = source = /note="Description of Artificial Sequence: Synthetic coding sequence"
  source 1..420: mol_type = other RNA
atgcaggccgcttgctggtacgtgttgttccttcttcaaccaacagtgtatctagtgacatgtgcaaaccttactaacggcggaaagtcagagcttctcaagtcaggaagctccaagagcacattgaagcatatttggaccgaatcatccaaggacctttctatttcaagactactctcgcaaaccttccgcggcaaagaaaatgacacggacctcgaccttagatacgatacccccgaaccgtactccgaacaggatttgtgggattggcttcgcaatagcaccgacttgcaggagcccagacctagagccaaaaggaggcctatagtaaagactggtaaatttaagaaaatgtttggttggggagacttccactctaatataaagaccgtgaagctgaacctattgatcacaggctag

SEQ ID NO: 14627 - RNA, 2412 nt, synthetic construct
  misc_feature 1..2412: note = source = /note="Description of Artificial Sequence: Synthetic coding sequence"
  source 1..2412: mol_type = other RNA
atggcggctgcaggccttgtggccgttgcagcagctgctgaatactcaggaactgtcgcatctggaggcaacctcccaggagtgcactgcggaccaagctcaggagcaggtccaggcttcggcccgggttcatggtctagatccctcgacagagcgcttgaggaagctgctgttacaggcgtcctttccctgtctggccggaaactgcgggagtttccgcgcggtgccgcaaaccacgacctgaccgacacaaccagagctgatctgagcagaaacaggcttagcgagatccccattgaggcgtgccacttcgtctcattagaaaatcttaacctttatcaaaactgcatccggtacattcctgaagccattctcaacctgcaggctctaacctttctaaatatatcaaggaaccagcttagcaccctccctgttcacttatgtaacctcccgctcaaagtcctgattgcttcaaacaataaactggtaagtcttcccgaggaaattggacatttgcgccacctgatggaattggacgtttcgtgtaacgaaatccagactattcccagccagattggtaacttagaggctctccgcgatctcaacgttcgaagaaaccacctggtgcatttgcccgaggaattggccgagctgccccttataaggctggatttcagttgcaacaaaatcaccaccatccccgtctgctaccggaacttgcgccacttacagaccatcacactcgacaataatcctctacaatcccctcccgctcagatctgtattaagggaaaggtgcatatttttaaatacctcaatatacaggcttgtaaaatcgctcccgacctacctgactacgatcgccgcccactcggatttggctcgtgtcatgaggaactgtatagtagtagaccgtacggcgctctggacagtggcttcaactctgtcgactccggtgacaagaggtggagcggcaacgaaccgacagatgagttctccgatttgccccttcgagtagccgagataaccaaggaacagcgattgaggcgtgagagccagtatcaggaaaataggggatctctagtggttaccaatggcggagtagagcacgaccttgaccaaattgactacatcgattcctgcacggccgaagaagaagaggccgaggtgcgacagcctaagggccctgaccctgattctttaagctcacagttcatggcctatattgagcaacgcagaataagtcatgaaggttcgcccgtgaaaccagtagctattagagaattccagaaaactgaggacatgagaagataccttcaccagaatagagtacccgcagaaccaagttccctgctgtctttgtctgccagccacaatcaactcagccacacagaccttgaattgcaccagagaagagagcagctggttgaacgtactcgacgggaggcccagctcgctgctctacagtacgaggaagaaaaaattaggactaaacaaatacagcgcgacgccgtcttggatttcgtgaagcagaaggctagtcagtcaccccaaaagcaacatccactgttagatggcgtggatggtgaatgcccattcccaagcaggagatcccagcataccgatgattctgccttgtgcatgtcattatccggccttaatcaagtgggatgcgctgccaccttacctcactcttcagccttcacaccactaaaaagcgacgatcggccaaacgcccttctgagttccccagccactgaaacagtacaccactcacctgcttatagttttccagcagctatccagcgaaaccagcctcagagaccagaaagttttctgttccgagcgggagtgcgtgcagaaaccaataaaggacacgcttcccctctgcctccttcagccgcgccgacaacggactcaactgattctattaccgggcaaaactccaggcagcgcgaagaggaactcgaattaatagatcaactgcgaaaacatatagagtaccgactgaaagtgtcactgccatgcgaccttggggccgccctgactgacggagtggtcctgtgccacttagctaaccacgtacggccaaggtcagtgccgtctatccacgtgccctcccctgctgtacccaaactgaccatggctaaatgtagaagaaatgtcgaaaattttttggaagcttgccggaagattggcgttccacaggataacctttgttccccctcggatatcttgcaactcaacctgtctgtcaagaggacggttgaaacactgttgtcgcttggagctcactctgaagaatctagtttcgtatgcctgagtttgcagctgctaggatttgtcgccttctattgcaccgtgatgttgaccttgtgtgttctgtactactggctttttcctgcaagatag

SEQ ID NO: 14628 - RNA, 633 nt, synthetic construct
  misc_feature 1..633: note = source = /note="Description of Artificial Sequence: Synthetic coding sequence"
  source 1..633: mol_type = other RNA
atgtacaaagctagacctccagccggcagcgggggacccggggccgaacccccagctatggcagccccccggggacgcgccgccccatggaccaccgccctacttctgctgctcgcttctcaggtgttgagccctggcagttgcgccgacgaagaagaagtgccagaggaatgggtgctgctgcacgtcgtccaaggccaaattggggccgggaactattcgtatttgcgcctgaatcatgaaggaaaaattgtgctgaggatgaggagccttaagggagacgcggatctatatgtcagtgcaagttctttacatcccagttttgacgattacgagcttcagagtgccacgtgcggaccagatgctgtttctatccccgcacactttaggaggccagttggcattggcgtgtacggacatccatcacacctagagtcagagtttgaaatgaaggtatactatgacggaacggtagagcagcaccccttcggtgaagccgcatacccagccgacggagccgacgccggccagaagcacgccggagcccccgaggacgcaagccaggaagaggaatctgtgctttggacgattctcattagcatccttaaattggtacttgaaattctcttttag

SEQ ID NO: 14629 - RNA, 486 nt, synthetic construct
  misc_feature 1..486: note = source = /note="Description of Artificial Sequence: Synthetic coding sequence"
  source 1..486: mol_type = other RNA
taatgtccgaccgaaatcatcgccttcggagacagattagaagagtttagaagcatcaacacagaagtcgttgcgtgttccgtggattctcagtttactcacctagcttggatcaacacaccaagacgccagggaggcttaggccctattcgcattcccctgctgtctgacctgacacatcaaatctctaaggactacggtgtatacctcgaggacagtgggcataccctgcgaggactattcattatcgacgataaaggaatacttagacagattacgctgaatgacctgcccgtcggcagatccgtcgacgagactcttcgactggtacaagccttccagtataccgataagcacggagaagtttgtcccgcagggtggaagccaggttccgaaactattaagcctgaggacactatgaaagcttggtggccaagggaatcctacaacccaagatcctcctggaaagcagaagtttttaggtag

SEQ ID NO: 14630 - RNA, 2886 nt, synthetic construct
  misc_feature 1..2886: note = source = /note="Description of Artificial Sequence: Synthetic coding sequence"
  source 1..2886: mol_type = other RNA
atgctgctgctactgctcctggctccactattcttacgcccacctggggcaggaggcgcccaaactccaaatgctacaagcgaaggctgtcagattatccaccccccttgggagggcggtatcagatatcgggggttgaccagagatcaggtgaaagcaattaatttcctacccgtggactatgagattgagtacgtctgtaggggagagagggaagtcgtcggccctaaagtgaggaaatgcttagcaaatgggtcatggactgacatggataccccaagtagatgtgttcgaatctgctcgaagagttaccttaccttagaaaacgggaaagtttttctgacaggtggcgatctccccgccttagatggagctcgggtggatttcaggtgcgaccccgactttcatctggttgggtcttctagaagcatctgttcacagggacaatggtcaactcctaagccacattgtcaggtcaaccgaaccccacatagcgagagaagggccgtctatatcggagctctcttcccaatgagcgggggctggcccgggggtcaggcctgccagccggctgtcgaaatggccttagaagacgttaattcacgacgagatattctgcccgactacgaactgaagctgatccatcacgatagtaaatgcgaccccgggcaggctactaaatacctgtacgaattgctctacaacgatccaattaaaattattctcatgcctggatgcagcagcgtcagcacccttgtcgcggaagctgcacgcatgtggaacctaatagtcctctcatacggcagctcctctcctgcactttctaatagacagcggtttccaacgtttttccggacccatccctccgctactttacataatcccacccgggtaaagttatttgagaaatggggatggaaaaagatcgcaaccattcaacagaccacagaagtcttcacatctacccttgacgatttagaggaaagagtgaaggaagcaggaatagaaataacatttagacagtcctttttcagtgatcccgccgttccagtaaagaatttaaaaaggcaagatgcccggataatagtgggattgttctacgagaccgaggcacgaaaagttttctgtgaggtgtataaggagcgactcttcggcaaaaagtacgtgtggttcctgattgggtggtatgcggacaactggttcaaaatctatgacccttcaataaactgcacagtggatgaaatgactgaggctgtagaaggtcatattacgactgagattgtaatgttaaatcctgccaacacacgaagtatcagcaacatgacgtcacaggaatttgtggaaaagctgactaagcggctgaaaagacatccggaggaaacaggcggcttccaagaggctccgctcgcatacgatgccatttgggcactggcacttgccttaaataagacctcaggcggaggaggcagatccggggtgagactggaagatttcaactacaacaatcaaacaatcacagaccagatctatagagctatgaacagtagcagctttgaaggggtgtctggccacgtcgtgtttgacgcgtcgggcagtagaatggcctggaccttaatagaacagctgcaaggtggttcttacaaaaaaattgggtattatgactctaccaaggacgatctctcctggagcaagactgacaaatggattggcggaagcccccccgcagaccaaaccttagttattaagacattccgcttcttatctcagaaactgtttatatcagtcagcgtcctttcctcactcgggattgtcttagccgtcgtgtgtttaagttttaacatttacaactcacatgtgaggtatatacagaactcacagccaaatctgaataacctgacagccgtggggtgctctttagctctggcagcagtgttccctctggggcttgacggatatcatattgggagaaatcagtttccgtttgtatgtcaggcgcgactgtggctactggggctggggttttcattaggttacggcagcatgtttacgaaaatctggtgggtgcatactgtcttcacgaagaaagaggaaaagaaggaatggagaaaaacgctggagccttggaagctgtacgccacagtagggttgctcgtcggaatggatgtcctgaccttggccatttggcagatcgtagatccccttcaccgtactatcgagaccttcgccaaagaagagcctaaagaagatattgatgtgagtatactgccacagcttgagcattgctcctctcggaaaatgaacacctggcttgggattttctacggatataagggcctgcttctgctgcttggaatctttctggcatacgaaacaaaatccgtgagtacggaaaagatcaacgatcaccgcgcagtgggtatggctatttacaacgtcgccgtcctctgcctgataacagcacccgtgactatgattctgtctagccagcaggacgcagcctttgcctttgcctcactagccatcgtgttcagttcctacatcacacttgtcgtgctgttcgtgcccaagatgcgccgactcattactcgcggagaatggcaaagcgaggcgcaggacacaatgaaaaccggttcatcaaccaataataatgaggaggagaaatcaagactgctcgagaaagaaaaccgcgaacttgagaaaatcatagcagaaaaagaggaacgcgtgtctgagttacgtcaccagctccagtcccggcaacaactaagatctcgacgacaccctcctacaccacccgagccttcaggcggattacctcgcggacctccggagccccccgaccggctgagttgcgatgggagtagggtacacttactgtacaagtag

SEQ ID NO: 14631 - RNA, 2853 nt, synthetic construct
  misc_feature 1..2853: note = source = /note="Description of Artificial Sequence: Synthetic coding sequence"
  source 1..2853: mol_type = other RNA
atgacgtggcggatgggaccacgttttactatgttactggccatgtggttggtatgcggctccgaaccccaccctcatgccaccatacgcggctcccatggtggcagaaaagtccccctcgtatcacctgattcctcaaggccggcgcgctttttgcgccacacaggcaggtcccgcggcattgaacggtccactctggaagaacctaatttacagccgctgcagcgtcgacgatcagtaccagtgcttagattagcgagaccaaccgaaccccctgccagatcagacatcaatggagcagccgtaaggcccgaacagaggccagctgcccgcggatcccccagagaaatgattagagacgagggatcatccgcgcggtctagaatgctgcggttcccttcagggagttcatcgcctaacattctcgcatcattcgctggtaagaatcgcgtctgggttatcagcgccccacacgcttcggagggttattacaggttgatgatgtctctgctaaaagacgacgtgtactgcgagctggctgaacgtcatattcaacagattgttctatttcaccaggcaggagaagagggaggtaaggtgcgccgaatcacaagcgagggccagatacttgagcagccattggatccgtccctaattcccaagctcatgtcatttctgaaactggagaaaggaaaattcggcatggtgttgctaaagaaaactttgcaggtggaggaaagatatccatatcccgtgagactggaagccatgtatgaggtcatagaccagggccctataagaaggatagaaaaaatacgccagaagggttttgtgcagaagtgtaaggcgtcaggagttgaaggtcaggtagtcgccgaaggtaatgacggcgggggaggtgcagggcgcccctcacttgggagcgagaagaagaaagaagacccccggagagcacaggtcccccctactcgcgagagtcgcgtcaaagtcctgcggaaattggccgccactgctcccgcactccctcagccaccttctaccccccgcgccactacactgccccctgcccctgctactaccgttacacggagcacaagcagagctgttacggtcgccgcacgccccatgaccactaccgctttccccacaacacagagaccatggactccatcaccctcccacaggcctccaacaaccaccgaagtcatcacagcccgccgcccatctgtgtctgagaatttatatcctccctcacggaaggatcaacaccgggagcgtccacaaaccacacgtcgtccctcaaaagctaccagcctcgagagtttcaccaacgccccccctaccaccatcagcgagccgtccacaagagccgccggcccgggcaggtttcgcgacaataggatggaccgccgtgagcatgggcaccgagatccgaacgttgtcccaggtcccccaaaaccagctaaagagaaacccccaaaaaaaaaagcccaggataagatcctgtccaacgaatatgaagagaaatacgacctatcacggcccaccgcttcccagctcgaagatgaactgcaggttggaaatgtccctctgaaaaaggctaaggaatctaaaaagcacgagaagctggaaaaacctgagaaagagaagaaaaaaaagatgaaaaatgagaacgcagataaactcctcaagagtgagaagcagatgaagaagagtgaaaagaaaagtaagcaagagaaggagaagtcaaagaagaagaaaggcggaaaaaccgagcaagatggttatcaaaagcctaccaataagcatttcacccagtcccccaaaaaaagcgtggcagacctcctgggcagttttgaaggaaagcgtcgcctcctcctgatcaccgcacctaaggctgaaaacaatatgtatgtgcaacagcgcgatgagtatctcgaatcgttttgcaagatggccaccagaaagattagtgtcatcaccatctttggccctgtgaataactctaccatgaagatcgaccatttccaactggataatgaaaaaccaatgcgggtcgtggacgatgaggatttggtcgaccagcggctaattagcgaactgagaaaagaatatggcatgacatataatgatttcttcatggtactgacagatgttgatctgcgagtcaaacagtactacgaagttcccattaccatgaagtctgtatttgatttgattgatacctttcagtctcgtattaaagacatggaaaaacagaaaaaagagggtattgtttgcaaagaagacaagaaacaatccctggagaattttttgtcccgatttagatggagaagaaggcttcttgtgatttcagctcctaatgacgaggattgggcttatagccagcagctgtcagcattgtcaggacaagcttgcaacttcggcttgcgtcacatcacgatactaaagctgctaggagttggtgaggaagttggcggagtccttgagctattccccatcaatggttcctccgtagtcgagcgcgaagatgttccagcacacctggtaaaagatatcagaaactacttccaggtcagcccagaatacttttccatgctcttggtcggtaaggatggcaatgtcaagagctggtacccgtcaccaatgtggagcatggtgattgtgtatgaccttattgatagcatgcagttacgccgccaggaaatggccattcaacaatccctgggtatgcgctgtcccgaggatgaatacgccggttacggttaccattcttatcaccaggggtatcaggacggatatcaggatgattacagacaccatgaaagttaccaccacgggtatccatactag

SEQ ID NO: 14632 - RNA, 351 nt, synthetic construct
  misc_feature 1..351: note = source = /note="Description of Artificial Sequence: Synthetic coding sequence"
  source 1..351: mol_type = other RNA
atggcagctggctccgcaccgatgcagctacacttgcgggctaccattcgtatgaaggacgggttgtgcgtgccgcggaaatggatatatcacctgacagagggctcaacagatctgaggacggaaggcagaccggatatgaagaccgagctcttttccagcagctgcccaggaggaattatgctaaacgagacaggccagggctaccagagatttctgttgtacaataggtcaccccaccctcctgaaaaatgtgttgaagagtttaaatcgctgacatcctgcctggatagcaaggctttcctgttaacgcctagaaaccaagaagcctgtgagttatccaataattag

SEQ ID NO: 14633 - RNA, 1251 nt, synthetic construct
  misc_feature 1..1251: note = source = /note="Description of Artificial Sequence: Synthetic coding sequence"
  source 1..1251: mol_type = other RNA
atgaagtttcagggtccactggcctgcctgttgctcgcattatgcctggggagcggtgaggctggaccactccaaagcggcgaggaaagcacaggaaccaacattggcgaggccctgggacacggactgggggatgcattaagtgaaggggtgggaaaggcaattggcaaagaagcagggggtgccgcaggttccaaggtgtcagaggctctgggacaaggaacccgcgaggcggttgggactggagttcgtcaggtgccaggttttggtgtagctgatgcgctgggaaaccgggttggtgaggcagcccatgcgctaggaaatacaggccacgaaatcggaaggcaggccgaggatgtgattcggcacggagctgatgcagtgagaggaagttggcagggtgtgcctggacacaatggcgcctgggagacaagcgggggtcatggcatttttgggagtcagggtgggcttggaggccaggggcagggcaaccccggaggacttggcactccttgggtgcacggctaccctggaaatagtgctggtagttttggaatgaatccgcagggtgccccatggggtcagggaggaaatgggggacctcccaactttggaacaaatacacagggcgcggtcgctcagcccggttatggtagtgtccgcgccagcaaccaaaatgaggggtgtacaaacccgcctccttccggatctggaggaggctctagcaactcaggaggcggttcagggtcccaatccggttcttcaggctcaggctctaatggcgacaacaataacggtagttctagcggcggctccagtagcggtagctctagtggcgggtcaagtggcggatcttccggcgggtctagcggaaactccggcggttcacgtggtgattccggatctgagtcaagttggggcagcagcactggtagcagcagcgggaaccacggggggagtggcggcggtaatgggcataaaccagggtgtgagaaaccaggcaatgaagcacgtggttcaggggagtccggtattcagggatttcgaggacagggtgtgagcagcaacatgcgtgaaatcagcaaagaagggaaccggctgctgggcggaagtggtgacaattatcgcaattccgaaacctccccaggcatgtttaactttgataccttctggaaaaattttaaaagtaaactgggattcattaactgggacgcaatcaacaaggatcagagatctagccgcataccttag

SEQ ID NO: 14634 - RNA, 150 nt, synthetic construct; identical to SEQ ID NO: 12995
  misc_feature 1..150: note = source = /note="Description of Artificial Sequence: Synthetic coding sequence"
  source 1..150: mol_type = other RNA

SEQ ID NO: 14635 - RNA, 978 nt, synthetic construct
  misc_feature 1..978: note = source = /note="Description of Artificial Sequence: Synthetic coding sequence"
  source 1..978: mol_type = other RNA
atgcagggccgggttgccggcagctgcgctccattaggactgcttctggtgtgcctccacttaccgggattgttcgctcgttccatcggcgtcgtagaagaaaaggtcagccaaaatctcgggactaacctgccccaactcggtcagccgagctcgactgggccctccaattccgaacacccccaaccagctcttgatccccgtagtaacgatctggccagagtccctttgaaattaagcgttccagccagcgatgggtttcctcctgccggcggttctgccgtccaaaggtggcctccgagctggggtttgccggctatggactcttggccgcctgaggacccctggcaaatgatggctgccgcagcagaagatcggcttggggaggctctccctgaagaactgtcatatctgtcatcagccgccgccttggcacctggctccggtccattgcctggagaatcatcgcctgatgctacaggactgtccccaaaggcctcactcttacaccaggacagcgagtcaaggaggctaccgcgctccaactctttgggtgcaggcggcaagattttgagtcaaaggccaccatggtcactcatccatagagtcctgccagatcatccatggggaaccttaaacccttctgtgtcatggggaggtggtggccctggtacgggatggggcacccgacctatgccccatccagaaggcatctgggggatcaataaccagcctcccggcacttcatggggaaacattaatcgctatcccggcggctcatgggggaacatcaatagatatccaggtggttcctggggcaacattaaccggtaccctggaggctcttggggaaatatccatctgtaccctggcatcaacaacccctttccgcccggcgttctgagacctcctggcagcagttggaacattcctgcaggctttcctaatcccccctcaccccgacttcagtggggatag

SEQ ID NO: 14636 - RNA, 390 nt, synthetic construct
  misc_feature 1..390: note = source = /note="Description of Artificial Sequence: Synthetic coding sequence"
  source 1..390: mol_type = other RNA
atggccgccggctccgcacctatgcagttgcacctgcgggccaccattcgcatgaaagacgggctctgcgtgccccgaaagtggatttaccacttgacagaaggttccactgatctccggactgagggtagaccagatatgaaaactgagttgttcagctcttcttgccccgggggaatcatgctgaacgagaccggtcaaggctatcagagatttctgctttataatcgctcgccccatcctcctgaaaaatgcgtcgaagaatttaaatcacttacatcttgcctagattcaaaagctttccttctaacccctcgcaatcaagggaagggcttgaaatctcataaaacaggactaggccttacaaagtcctctggcgttaccggctag

SEQ ID NO: 14637 - RNA, 1056 nt, synthetic construct
  misc_feature 1..1056: note = source = /note="Description of Artificial Sequence: Synthetic coding sequence"
  source 1..1056: mol_type = other RNA
atggctggcattccaggactgttattcctcttgtttttccttctctgtgccgttggacaggtgagtccatatagcgccccatggaaacccacctggcccgcatataggcttcccgttgtgctaccacagtcaactttgaatttggccaagcagtatctgagttatgaaacattatacgcaaatggttctagaaccgaaacccaggttggaatttacatattaagctcatccggggatggggcccaacatagggattcggggagttccgggaaaagtcggcgaaagagacagatatacgggtacgatagccgcttctccatctttggaaaagatttcctcctcaattatccgttcagcacatcagtaaaactgtcgacaggctgtacaggcacactggttgccgagaaacacgtacttactgccgcacattgtatacacgatggtaagacttacgtcaaagggacacaaaagttacgagtgggcttcctaaaacccaagtttaaagatggcggacggggtgctaacgacagcacctccgctatgcccgagcagatgaaatttcaatggatccgcgtgaaaagaactcatgttccaaaagggtggattaaggggaacgcgaatgacatcggaatggattatgactacgccttactggagctcaagaagccacataaacggaaatttatgaagattggcgtctcacctcctgccaagcagctcccaggcggccggatacattttagcgggtatgacaatgaccggcctggtaaccttgtgtatagattttgcgatgtgaaggatgaaacgtacgacctcttataccagcagtgtgacgcacagccaggtgcgagtggtagcggcgtgtacgtgcggatgtggaagcggcagcaacagaaatgggagcgcaagataatcggaattttctcgggacatcaatgggtcgacatgaacgggtcaccacaagattttaatgtggccgtgagaataactcccctgaagtatgctcaaatttgttattggattaagggaaactacctcgattgccgtgagggttag

SEQ ID NO: 14638 - RNA, 345 nt, synthetic construct
  misc_feature 1..345: note = source = /note="Description of Artificial Sequence: Synthetic coding sequence"
  source 1..345: mol_type = other RNA
atggagcgcggcgctggcgcaaagctactgcccctgctcctcctcttaagagcgaccggtttcacttgcgcccagacagacggtagaaacggttacaccgcagtcatagaagtgacgagtggcggtccttggggtgactgggcctggccagaaatgtgccccgatggattctttgcttcgggcttttccctgaaagtcgaaccaccacaaggaatacctggcgatgacacagcattaaatggcatcagactacactgtgcacgcggaaatgtcttaggcaatacgcacgtggtggaatcacaatcagggagatggggtgcaggcgtggaagatccgctcggttag

SEQ ID NO: 14639 - RNA, 825 nt, synthetic construct
  misc_feature 1..825: note = source = /note="Description of Artificial Sequence: Synthetic coding sequence"
  source 1..825: mol_type = other RNA
atgtggcgttgcccgctcggtttgctgttgttgctgcccctggcaggtcatttagctctcggggcccagcaggggcgcggccgtcgggaacttgctccaggacttcatctgcgcggaatcagagacgcaggcggaagatattgccaggaacaggacttgtgctgtcgcggaagagctgatgactgcgctcttccctatctgggagccatatgttactgcgacctgttttgcaatcggacagtgtcagactgctgccctgacttttgggacttttgtctgggcgttcccccccctttcccccccattcaaggctgtatgcatggcggccgcatttaccccgtgctggggacctattgggataactgtaatcgatggccaccactcgagtgttgggatttgcttccacctgccctgcccggccctgtatgggcggccctcggagccaaggaagaaatggctgggaaggaccgtaccgtgtattgtccactcttgatgaaggcgttgggcgccagagtcggtgaatgtcccgggtgccagtcccctcaaagaatgctcccagagtcatctagggtgctgctgccaaggtgcgcggaaggcgaacaacccggcgtacaaagaggcaagggccgcatgcgcaaggcctttcctgctcttcagacacccctagcactgcctagctccgctccagcctccccaggagccgggaagccatcacatactggcagctggttgcctctccgattactcaagcggcaacattggcgatgggaaccatggaccgcttgtaaagaggccgtgcagcacctagtgattactgagttatag

SEQ ID NO: 14640 - RNA, 438 nt, synthetic construct
  misc_feature 1..438: note = source = /note="Description of Artificial Sequence: Synthetic coding sequence"
  source 1..438: mol_type = other RNA
atggctcagctgttcctcccactgctcgcagccttagtgctcgcacaggctcctgctgcacttgctgacgtgttagaaggggattcttcagaggatcgcgctttccgtgttcgaatcgctggcgatgcacctctacagggagtgctcggaggcgcgctcaccattccctgccatgtccactacttgcgaccacctccttcaaggagggccgttctagggtcacccagggtcaagtggactttcctgtctcgtggccgagaagccgaagttctggtagctcgaggcgtacgtgtcaaagtgaatgaagcctacagattccgcgttgctcttccagcctatcccgcatccctgactgacgtttccctggcccttagcgaacttcgacccaatgacagtggcatttatagatgcgaagtgcagcatggtattgacgattag

SEQ ID NO: 14641 - RNA, 567 nt, synthetic construct
  misc_feature 1..567: note = source = /note="Description of Artificial Sequence: Synthetic coding sequence"
  source 1..567: mol_type = other RNA
atgtttcatcagatctgggcagctctcctctatttttacggaattattctaaactcgatctatcagtgcccagagcattcccagttgacaactctcggcgtggacggaaaagaattccctgaagtgcacctcggccaatggtatttcattgcaggggcagcacctacaaaagaggagctcgccacttttgatcctgtcgataacattgtattcaacatggccgccggatcggctcccatgcaattgcacttaagggctactattcgaatgaaagacgggttgtgtgttcccaggaagtggatttatcatctcactgaaggttccactgatttacgaactgaaggaaggcccgacatgaagaccgagctgttctcaagttcctgccctggagggataatgttgaatgagactggccagggatatcagcgtttcctgctgtataatagaagcccgcatccaccggaaaaatgcgttgaggaattcaaatcattgacgtcttgcctggacagcaaagcctttttgcttactccccgtaaccaagaggcctgtgagttaagtaacaactag

SEQ ID NO: 14642 - RNA, 558 nt, synthetic construct
  misc_feature 1..558: note = source = /note="Description of Artificial Sequence: Synthetic coding sequence"
  source 1..558: mol_type = other RNA
atgggtccagctggctgcgcattcaccctcctactcctgctcggaatatctgacagagactaccacagtgccctccaggaagccgaagtgcctatcattgatagacaggcttgtgagcagctgtataaccctatcggtatctttcttccagccctcgaacctgtaattaaggaggataaaatctgtgccggcgatactcaaaacatgaaagactcttgtaagggagattcaggagggcccttatcatgtcacatagacggtgtttggattcagacaggtgtagtttcgtggggcctggagtgtgggaaatcattgcctggggtgtacacaaacgtcatctactatcagaaatggattaatgctaccatttctcgagccaacaatcttgatttttccgattttctttttcccattgttttactcagcctagctctactacgccctagctgtgccttcggaccaaacacaatccatagagtcggtactgtggcagaggcggttgcctgtattcaagggtgggaagagaatgcttggcgttttagtccacgcggccggtag

SEQ ID NO: 14643 - RNA, 1653 nt, synthetic construct
  misc_feature 1..1653: note = source = /note="Description of Artificial Sequence: Synthetic coding sequence"
  source 1..1653: mol_type = other RNA
cccgcccctgctagtcgaaagctgctgccccgcaggcacttgagcgaaaagagccaccacatatcaatccccagcccagatattagccataagggcctccgatcaaagaggactcaaccgagcgatcccgagacatgggagtccctgcccagacttgactcacagcgacatggcggccctgaattttcattcgatctgttgccagaagccagggcaatcagagtgacgatatcaagcggaccagaggttagcgtgaggctctgccaccagtgggcactagaatgcgaagaactatcctcaccatatgacgtgcaaaaaattgtctcagggggccatactgtagaactcccatatgagttcttgttaccatgcctgtgcattgaagcttcgtatctccaagaggacactgtccgcagaaaaaagtgtcccttccaatcatggcctgaggcttatggaagcgatttttggaagtctgttcactttaccgattactctcagcacacacagatggtcatggcgttaacgctccggtgcccacttaaactggaagccgcactgtgtcagagacacgattggcataccctgtgcaaggacttaccaaatgcgacagcaagagagtccgacgggtggtatgtgcttgagaaagtcgatctccatccccagctgtgctttaagttctccttcggcaacagttcacacgtggaatgcccgcatcaaactggttctttaacttcatggaatgtttctatggatacccaggctcaacaactgattctgcacttctctagccgaatgcacgccactttttcagcagcatggagtttacccggactcggccaggataccctggtcccgccagtgtatacagtttcccaggcccgaggttcctcaccagtttctctggatctaattatccctttccttagacctggatgctgtgtgctcgtttggagatcggacgtccagttcgcttggaagcatcttttgtgtcccgatgtgagttaccgtcatctgggcttgctaattctggcactgctagctctacttacgctgctgggagtcgtcctcgctttaacttgtcgtcgtccacagtctggtccaggccccgctagaccagtgcttctgctgcatgctgccgattctgaggcccagaggcgacttgtgggcgccctagctgagcttctgcgggccgctctcggggggggccgcgatgtgatagttgatttgtgggaaggtcgacatgtggccagggtgggcccactcccttggctgtgggctgctcgtacccgcgttgcgagagaacagggcacagttctgctgttgtggtcaggtgctgatctgaggcctgtttctggtccagacccccgtgctgctcccctattagcacttctccacgccgccccccgtcccctcctcctgttggcatatttttcaagattgtgtgccaaaggcgatataccaccccccttgcgtgcattgcctcgatatagactgttgcgagacctgccccgtttattaagagccctggacgcccgcccttttgcggaggccacgagctgggggagactgggtgccaggcaaagacgccaatctcggctggagctgtgttcaagactagaaagagaggccgcaagactggccgatctgggatag

SEQ ID NO: 14644 - RNA, 816 nt, synthetic construct
  misc_feature 1..816: note = source = /note="Description of Artificial Sequence: Synthetic coding sequence"
  source 1..816: mol_type = other RNA
atgggaatagtttgcgcacagtgttcattcatattgctgctctcaataatccgcgccagaccccccccctttctcttttgccccttgagttcccagcgcacagaatctccgtacaaacctgtccacctgggtttaggacctacagacaaagtagcagccattgccatggcaagaattatcgacctggttccgtgggacgacggcagtacacatgtctacgcatcccccgcaatcctgttgccaatggaacgccaacggaatcagctagctggagtgaagcagcagctataccaccccgcacttccaacactgaggcacatggaccgcgataccgttaaggcatgtctaccagacgaacattgtcaaagtaccacttactgtcgcaaagacgagtttgacaacgcccactttaccctgctgggagtcccgaataagccacttcaatgcctcgacatcacggccactgggcagaagcttaggaaccgctatcatgaaggcaagctcgcacccatcgctcctggaattaacagagttgactggccatgtttcacgcgcgctatcgaggattggtcccatttcgtgtcatccgccggggaattcaagctgccttgtctgcgcaagcgcgctgagggtctatccggatacgcagtcagatatctcaagcctgacgtgacacaaacatggagatactgtctgtcacagaacccatccttagatagatacggccagaagcctttacctttcgatagtcttaacacctttcgcagttttggctcttcctattcccgcgtcaactacctaacaccctggcactag

SEQ ID NO: 14645 - RNA, 1743 nt, synthetic construct
  misc_feature 1..1743: note = source = /note="Description of Artificial Sequence: Synthetic coding sequence"
  source 1..1743: mol_type = other RNA
atgcatctatctgccgtgtttaatgccctgctcgttagtgtcctcgctgccgtgttatggaaacatgtccgcttgagggaacatgctgccaccctggaggaggaactcgcactctcccgacaagcgactgagcccgctcctgcactgcgtatcgattatcccaaagcactccaaatcttgatggagggcggcacacacatggtttgtacaggaaggacacatacagaccgtatctgccgttttaaatggctctgctactcaaatgaggcagaggaattcattttttttcatgggaacacttctgtgatgttgcccaacttaggctcaagaagattccagccagccctgctcgacctctccaccgtcgaagatcataacacccagtatttcaatttcgtcgagctgcccgccgccgccttgaggttcatgccaaagccggtcttcgttccagatgtggccctcatagcaaatagattcaatcccgataacttgatgcatgtcttccacgacgacctccttccgctgttctatactctccgccagtttcccggacttgctcacgaagccaggctgttctttatggaagggtggggtgaaggagcgcactttgacctgtacaaacttctttcccccaaacagccgcttcttcgggctcagttaaagacactgggacggttgctgtgcttctcacacgctttcgtgggactatctaagattaccacctggtatcaatatggattcgtgcagcctcaggggcccaaagctaacatcttggtttccggaaacgagatcagacagttcgccagatttatgaccgaaaaactcaatgtgtcccatacaggcgttccactgggcgaagagtacatcctggtgttctcccggacacagaatagactgattctcaacgaagccgaactgctactagctctcgctcaggagttccagatgaaaacagttacagtatccttggaagatcataccttcgccgacgtggtcagactcgtgtctaatgcgagcatgttggttagtatgcatggcgcacaattggtcactactctgtttctgccacgcggagcaaccgttgtggagctgtttccatacgcggtaaatccggatcattacaccccttataaaaccctcgcaatgctgcccggaatggatcttcaatatgtggcctggaggaatatgatgcccgagaatactgtaacacaccccgaacgaccttgggatcaggggggtattacacatttggaccgagcagagcaggcaagaatcctacagtcgagggaggtccctaggcatttgtgttgcagaaacccagaatggcttttcagaatttatcaggacaccaaagttgacatcccaagcctgatccagaccatcagacgagtggtgaagggtcgtcctggtcctaggaaacagaagtggactgtgggcttatatcccggaaaagttagagaagcacgatgtcaggcatctgtgcatggcgcatctgaggccagactgaccgtatcttggcaaattccttggaacctgaaatacctgaaagttcgcgaagttaagtacgaggtttggctgcaggaacagggagagaacacatacgtcccctatattttggcgctgcagaaccatacatttaccgagaacattaagccctttactacctatctcgtttgggtccggtgtatttttaacaaaatcctgctggggcccttcgctgacgtcctggtgtgcaatacttag

SEQ ID NO: 14646 - RNA, 513 nt, synthetic construct
  misc_feature 1..513: note = source = /note="Description of Artificial Sequence: Synthetic coding sequence"
  source 1..513: mol_type = other RNA
atggaattcgtagatgtcactgaaagcaatgcgagatgggtgcaagactttcggctgaaagcctatgcatcaccagcaaaattagaatccatagatggagcccggtaccacgcactactgatcccctcctgtcccggtgctctgactgacctggcatcttctggctccctggctcgcattctccagcactttcacagtgagagtaagcctatctgcgcagtgggccatggggttgctgctttgtgctgcgcgactaacgaggaccgcagttgggtgtttgacagttactccctgaccggcccttcagtgtgcgaacttgtgagagcccctggttttgctcgcctacccctggtagtggaggattttgtcaaggattccggcgcatgcttctcggcgagcgaacccgatgccgttcatgtagtcctcgatcggcacctcgttaccggacaaaacgcttcctctacagtgccagctgttcaaaatctgctgtttctatgtggaagccggaaatag

SEQ ID NO: 14647 - RNA, 1041 nt, synthetic construct
  misc_feature 1..1041: note = source = /note="Description of Artificial Sequence: Synthetic coding sequence"
  source 1..1041: mol_type = other RNA
atgaggctcttatttctagcagtactgcggccgcacactggaaacgccgtcactgcccaacgcgtacgagcccacctggaagccgcaggacacgtgtgcgtgctgaaagacgccttcgattttgaatcccgatctgagatcgccaatttgattctagccgaaaattgtgaggccgcactcgccctccacctgtatcggggcggcagattgcttcaagggcacagaatccccttcggagtcatttttggagggaccgacgtcaacgaggatgctaaccaggccgaaaagaatactgtaatgggcagggtcttggaggaggctaggtttgcggtcgcttttactgagtctatgaaggagatggcacaggcccagtggccccacgcaaaaggaaaagtttacgttcagtcccagggaattgccaccacccccaacgcggctttcaattggaatactttcctgcaaagatcagaaatcaatcagagcgccgacaatctacatatttttctgcttatctgcggcctcaggcaggtcaaagatcccttgtatttagtggatgcattctccgcctggcatcaagaggagccgaacgtgcatctggtaatcgtgggaccagaagttgacccagtttttactcgggaagttaaggctaaagtcaaaagggccgcaggagtgagactcattggcgagatgccccaggaagatctccatgccgtggtcaaaaactgctttgcggtggtgaacagctctgtatcagaaggtatgtctgctgcaatattagaagcgatggacttagaagtgccagttctcgctaggaatataccgggaaacgcagcagtcgttaagcacgaagtgaccggcctgctattctcaaatccacaggagttcgtgcacctggccaagcgccttgtctctgaccctgctctcgagaaggaaattgtggtaaatggaagggagtacgtgcggatgtaccactcatggcaggttgaacgtgatacttatcaacaactgatacgaaaattagaagggagtactgaagactag

SEQ ID NO: 14648 - RNA, 1482 nt, synthetic construct
  misc_feature 1..1482: note = source = /note="Description of Artificial Sequence: Synthetic coding sequence"
  source 1..1482: mol_type = other RNA
agcgaagccgtttatctgaacgacagtacatatgacggacatactgtggggggacttcaatacggtggtttgggacagctcgcggacggggtggtaggcttagatgactttcgaaaaagtcaggagctaagggtgtggcccggttacgactacgttggttggtcaaatcattctttcagttctggttatgtcgagatggagtttgagttcgatcggctgagagctttccaagctatgcaggtccactgtaataatatgcataccttaggcgcaaggctcccaggcggcgtggaatgtaggttcagaagaggtccggcaatggcttgggaaggtgagccgatgcgacataacttgggagggaacttgggggatccacgcgcccgagctgtgtctgtaccactgggcggccgcgtggcaagatttttacagtgccgtttcctgtttgccggaccttggctcttattctcagaaatctccttcatctcagatgtggtcaacaattcatcaccagcccttgggggtacctttcccccggcgccttggtggccaccaggccccccacctaccaatttctcttctctcgagctagaacccagaggacagcaacctgttgctaaggcggagggctcacccacagccatactgatagggtgtcttgtcgctataatactcctgcttctcctgattatcgctcttatgctgtggcgcttgcattggcgtagattgctcagcaaagtcttagaatcccatcctcgaacccgctcacccggactggtaggtatccgacccaccccactgcccgtttcaccaatggccctgcgctgttgttctcctatccagccaaccgctagtttctggcctctgacccctgtgccgctagaggctcgggctcccccacacccacctggacccaacccccccactccgagaggcgtgaccggcggcaacacatatgccgtgccagccctcccgccaggggcagtgggcgatggcccaccccgtgtagatttcccgaggagcagactgcggttcaaagaaaagctgggtgaaggtcagtttggggaagtacacttgtgtgaagtcgactctcctcaggatcttgtgagtctagatttcccactgaacgtccgcaaaggacaccctcttctcgtggccgttaagattctgaggccagacgccactaaaaatgctcgtaacgatttcctgaaggaggtaaagattatgtcacgactcaaggatcccaatataatccggctcctgggcgtgtgtgtacaagatgatcccctatgcatgataaccgactatatggaaaacggggacctgaaccagttccttagcgctcaccaactggaagataaagctgcagaaggggcacctggggatggccaggctgcccaaggcccaaccatatcttaccctatgctattacacgtggctgctcaaatcgctagtggcatgcgctatctagctaccctcaattag

SEQ ID NO: 14649 - RNA, 354 nt, synthetic construct
  misc_feature 1..354: note = source = /note="Description of Artificial Sequence: Synthetic coding sequence"
  source 1..354: mol_type = other RNA
atgttaattttctggaccattacactgtttctgctcggggctgccaagggaaaagaagtctgctacgaagatctgggctgcttttctgataccgaaccatgggggggcacagccattcgacctctgaaaatcctgccctggtctcctgagaaaattggaacaagattcctgctctacactaacgaaaatccaaataatttccagattctcctgttaagcgatcctagcaccatcgaggcgagtaacttccaaatggatcgtaagacccggttcatcatacacggatttattgataagggggatgagtcatgggtgaccgatatgtgcaagcccggagcctccccacgagcctag

SEQ ID NO: 14650 - RNA, 1581 nt, synthetic construct
  misc_feature 1..1581: note = source = /note="Description of Artificial Sequence: Synthetic coding sequence"
  source 1..1581: mol_type = other RNA
atgcaaggccccttactcctaccaggattgtgttttctcctgtccctgtttggagccgtcacacagaagaccaagacttcttgcgccaagtgtccacccaacgcctcttgtgtgaacaatactcattgcacatgcaatcacggctataccagtggaagcggccaaaaactgttcaccttccctcttgaaacctgcaacgccattgagactcaggccatcacggacaattgctcggaggagagaaagaccttcaatcttaacgtacagatgaatagtatggatatccgatgtagtgacattatccagggcgatacacaaggtccctctgccatcgcttttatttcttacagctctctgggaaatataattaatgcgacatttttcgaggagatggataaaaaagaccaggtttaccttaactcccaagtggtttcagctgctattggtcccaaaagaaacgtttcactaagtaaatcagttactctgactttccagcatgtgaagatgactccatccacaaagaaggtgttttgtgtatattggaagagtaccggacagggctcgcaatggtcgcgggatggatgttttctcattcatgtaaacaaatcacacacgatgtgcaactgctcacatctttcaagctttgcagtgctgatggcccttacctcacaggaagaagatccagtacttactgttattacatacgtgggcctctccgtaagcctgctctgccttctgttagccgcattaacttttctactatgtaaagccattaggaacaccagtacaagcctccatctgcagctgtccctttgtctgttcctagcccacctcctgtttctcgtgggtatcgatcggaccgagccaaaggtgctgtgctcaatcatcgccggtgcactgcattatctctacttggccgcctttacatggatgctgcttgaaggcgtgcacttgttcctgaccgctcgtaacttaaccgtcgtaaactactcctccatcaacaggctcatgaagtggattatgtttccagtgggctatggggttcccgccgttaccgtcgccatttccgctgccagttggcctcacctttacggtaccgctgacaggtgttggttgcacctagatcaaggctttatgtggtcttttctcggtccagtctgcgctattttctctgctaatctggtgctgtttatactggtcttctggattctcaaacggaaactttcctcccttaattcagaggtatcgacgatccagaacacacgcatgctagccttcaaagcgacagcacagctgttcattctgggttgcacatggtgtcttggcctactacaggtcgggccggccgctcaagtgatggcatacctatttactataattaattcgcttcagggattcttcatctttttagtctactgcttgctaagtcaacaggtgcaaaaacagtatcagaaatggtttagagagattgtaaaaagcaagtctgagtccgaaacatataccctgagtagtaaaatgggacccgattctaaaccaagcgaaggagacgttttccctgggcaggtaaagagaaagtattag

SEQ ID NO: 14651 - RNA, 5832 nt, synthetic construct
  misc_feature 1..5832: note = source = /note="Description of Artificial Sequence: Synthetic coding sequence"
  source 1..5832: mol_type = other RNA
tgacccagcctggctggtcggggagcaggacgcatggctccaggggcactgagaggcgggtgcgaacagagagctccaggaggcggggcccgtacagctgctcttgggccgtggccttggccaagtcctgggcctgcaccttctcctggggccgcccccccacggtcaagaaagatgtcaggcgccctgctatggcctctgctaccgctcctgctactgcttttgtcagcgagagatggggtccgagcagcccaaccacaagctccaggttacctcatcgcagcccccagcgtcttccgggccggagtagaggaagttatctcagtgaccatatttaatagccctcgagaagtgactgtccaggctcagttagtggctcaaggcgaacccgtggtgcaatctcagggagcgatccttgacaaaggaactattaaactcaaagtcccgacaggcctgcgtggacaagctctgttgaaggtttggggcaggggatggcaggccgaagagggacctttgttccataatcagacttcagtgaccgttgacggccgcggcgctagtgtctttatccagaccgacaagccagtgtacagaccccagcatcgagtgctgatctccatttttactgtctctcctaatttacgacccgtcaacgagaaactcgaagcctacattcttgaccctcgaggctcacgtatgatcgagtggcgccaccttaaacccttctgttgtggcataaccaatatgtcctttccattgtccgatcaacctgtccttggcgagtggtttatattcgtagagatgcagggccatgcatataacaagtcattcgaggtacagaagtacgtgctgcccaaatttgaactgcttattgaccctccaagatacatacaagacctagacgcttgtgaaaccggtactgtgagggccagatacacattcggcaaaccagtggccggagcactgatgatcaatatgaccgtgaatggcgtgggctactacagccacgaagttgggaggccagtactgcgaactaccaaaattcttggctctcgagatttcgatatttgtgtaagggacatgatcccagccgacgttcctgagcacttccgcggaagggtatctatctgggctatggtcacctccgtagacgggtctcaacaagtcgcgtttgatgactccaccccggtgcagagacaacttgtggacatacgttattctaaagacacaagaaagcagttcaagccgggactcgcatatgtagggaaagtggagctatcttaccctgatggctcccctgctgaaggagttactgtgcaaatcaaggctgagctaacgccgaaggacaacatatatacgagcgaagtggtgagtcagcgaggtcttgtgggtttcgaaatccctagcatccctacgtctgcccagcacgtgtggttagagactaaagttatggcattgaatggaaaacccgtgggtgcgcaatatttgcccagttatctcagcctcggctcctggtatagccccagccaatgctatctgcaactgcagcctccatcacacccacttcaggttggagaagaggcctacttctcagtgaaatccacatgtccttgcaactttactctttattacgaagtggccgcgcgcggcaatatcgttctgagtggacagcagccagcccatactacgcagcagagatcaaaacgggccgcacctgcactagaaaagccaattcgactgacacacttatccgagacagaacctccaccggccccagaagcagaggtagatgtttgcgtaacatctctgcatctcgccgtgaccccatcaatggtgcccttgggcagattgcttgtcttttacgtgcgggaaaacggggaaggagtggccgatagtttacaattcgcagtggagaccttctttgagaatcaagttagcgtaacctactctgctaacgaaacccagcctggcgaggtggtggacctaaggatccgagccgcacgaggatcatgtgtctgtgtggctgcagtggacaagtcagtgtatcttttacgatccggtttccgactgacacccgctcaagtctttcaggaactggaggactatgacgtgagcgacagcttcggagttagcagagaagacggaccattttggtgggccggccttactgcacaaagacgaagaagatcaagcgtttttccttggccatggggaataacaaaagatagcggctttgcattcactgagaccggacttgttgtgatgacagaccgcgttagtcttaatcatcggcaggatgggggcctgtacactgacgaggccgtcccagccttccagccccacactggatctcttgttgcagttgctccctctagacatccaccccggacggaaaagcgtaaacgtactttctttcctgaaacctggatctggcactgcctgaacattagcgaccccagcggggaaggcacccttagtgtaaaagtgcccgactctatcacctcctgggtgggggaagccgtagccctcagtactagtcagggtcttggaatagctgaaccaagcctcctgaaaacgtttaagccctttttcgttgattttatgttgcccgcgctaatcatccgaggggaacaagtgaaaattcccttatctgtgtataactacatgggtacttgtgccgaggtgtatatgaaactgagcgtccctaaaggcatccagttcgtgggtcatcccggtaagagacatgtgaccaaaaaaatgtgcgttgccccaggcgaggccgaaccaatctgggtggtcttatccttcagcgatcttggacttaataatattaccgctaaggcccttgcctatggggacacaaactgctgtcgagacggtcgcagtagcaaacatccagaagaaaatcatgccgaccgcagagttcctatcggcgtagatcacgtacgaagatctgtaatggtagaagcagagggggtccctcgcgcttatacttatagcgcttttttttgcccttccgagcgcgtccacatatccactcccaacaaatacgagttccagtacgttcagagacccctgcgccttacccgatttgacgtcgcagttagggcccataatgatgcacgagtcgccctgtccagcggacctcaggatacagcaggaatgatcgagatagtcctggggggccatcagaacacacggtcctggatctcaacttccaaaatgggagaacctgtagccagtgcgcataccgccaaaatcttatcttgggatgaattcaggacattctggattagctggcgcggtggactcatccaggtgggccatggaccagaacccagcaatgagagcgtgatcgtagcttggaccctccctagacccccggaagtccagtttattggtttctccaccgggtggggctcaatgggagaattcagaatttggagaaagatggaagtcgacgaaagctatagtgaagcgtttacactaggagtaccccacggtgccatccccgggtcagaacgggctacagccagcattatcggcgatgtgatggggcccaccctcaatcacttgaacaatctgctcaggttgccattcggatgcggtgagcaaaatatgattcacttcgctcccaacgtgtttgtactcaagtatcttcagaagactcaacagcttagccctgaggtagagagagaaaccacagactacctggtccagggttatcagaggcagctcacttataagcgacaggatggctcctattctgcttttggagagagagacgcgtccggctctatgtggctgaccgcatttgtgttaaaatcattcgctcaagcacggtcatttatttttgtcgaccctcgagaactggctgcagctaagtcatggatcatccagcagcagcaagctgacggatcattcctcgccgtcggacgcgtgctgaacaaagacatacagggtggaattcacggtactgtgccgctaaccgcgtacgttgttgtcgccctgttggagactggcacagcttccgaagaagaacgtggatccaccgacaaggcgaggcactttttagagagtgcagctccgctggcgatggacccctattcctgcgcattaactacatacgctctcaccctcctacgttctcccgctgctcccgaagcacttagaaaactgagatcacttgcaattatgagggatggcgtaacccactggtccttaagtaactcctgggatgtggacaaaggaacatttctgagctttagcgaccgtgtctctcaatctgtcgtttcagccgaggtggagatgacagcctacgccttgctcacatacacactcctgggcgacgtggccgccgcactgccagtggttaagtggttgagtcagcaacgaaatgccttaggaggtttctcttctacccaagacacctgtgtggcccttcaggccctggccgagtatgcaattctgtcttacgctggcgggataaatctgactgtctccctggctagcacaaacctcgattaccaagagactttcgaattgcaccgcaccaaccagaaagttttacagaccgctgcgattccaagcctcccgaccggactgtttgtatctgcaaaaggagatggctgttgtttgatgcagattgatgtgacatataacgttccagatccagtggctaaaccagcttttcagctactagtttccctgcaagagccagaagcacagggtagaccacctcctatgcccgcttctgccgcagagggctctagaggagattggccccccgctgatgacgatgatcccgctgccgaccaacatcatcaggaatataaagtaatgctcgaggtctgcacaagatggctgcacgccggtagcagcaacatggcagtactggaagtgccactgctgtctggatttagagccgatatcgagagcctggagcagttgcttctggacaaacacatgggaatgaagcgatatgaggtggccggccgtagagtgctgttttactttgatgagattccaagccggtgtctgacctgcgtccgcttcagagccctaagagagtgtgttgtgggaagaacttccgcccttccagtgtcggtgtacgactactatgaacccgcgtttgaagctactcggttctataatgtatccacccacagcccgttggctcgggaactctgtgcaggcccagcgtgtaatgaggtcgaaagggcgccagctaggggacccgggtggttccccggtgagtcaggtcctgccgtcgcccctgaggagggggccgccatagccaggtgcggctgtgatcacgactgtggtgcgcaaggaaacccggtgtgtggctctgatggtgtcgtttatgccagcgcctgtcgccttagagaagcagcttgtcgccaggctgcaccgttggagcctgcgcctccttcctgctgtgccttagaacaaagactgcctgcaagctctagttcaacgtacggtgatgatctggcctcagtcgcacccggtccgcttcagcaagatgtgaaactgaatggggccggcctcgaggtcgaagattcggacccagaacctgaaggcgaagcggaggacagagttaccgccggcccgcggccccctgtatcttctggcaatcttgaatcatccacgcagagcgcatcaccttttcatcggtggggacaaacgcccgctccacagagacattcaggaagggttgtgggagctcaccggccagggcttctctccccagtgtttgtttatagtccagcgtttcagagtggtggcgaagaaggcctgtggatgtccaacacttgtactctgcggtag

SEQ ID NO: 14652 - RNA, 456 nt, synthetic construct
  misc_feature 1..456: note = source = /note="Description of Artificial Sequence: Synthetic coding sequence"
  source 1..456: mol_type = other RNA
atggaggccaccggaacagacgaggttgataaattgaaaacgaagttcatatccgcatggaataacatgaagtatagctgggttttaaagacgaaaacttacttctccagaaacagtccagtactgctgctgggaaaatgttatcactttaaatatgaagacgaggacaaaactttacctgccgaatcaggatgcaccattgaggaccatgttattgctggaaatgttgaggagtttcggaaggactttatttctcgcatttggctgacctatcgggaagagtttccacaaatcgaagggtccgctctcacgactgattgtggatggggatgcaccctcagaactggacaaatgctcctggctcaaggcttgatactgcactttctgggtcgagcgtggacttggcctgatgccctgaatatagagaatagtgactctgagtcctggacatcttag

SEQ ID NO: 14653 - RNA, 2616 nt, synthetic construct
  misc_feature 1..2616: note = source = /note="Description of Artificial Sequence: Synthetic coding sequence"
  source 1..2616: mol_type = other RNA
atgcggaagcctcgccgaaagtcccgtcagaatgcagagggtcggcgctcaccatccccctattcccttaaatgctctccaacacgagagaccttaacctacgcacaggctcagagaatagttgaagttgatattgatgggagactccatcgcatttctatctacgatccacttaagatcatcactgaagacgaactcactgcccaggatattacagaatgcaacagtaataaagagaactcggaacagccccagtttcccggcaagtccaagaaaccatccagcaagggtaaaaagaaggaatcttgtagcaagcacgcgagtggaacgagctttcacctccctcagccctccttccggatggtcgattccggtatccagccagaggcccccccactgcctgcagcctactacagatatattgagaaacctcctgaggacctggacgcagaggtagaatatgacatggacgaagaagatctcgcatggcttgacatggttaatgaaaaaagaagggtcgacggccacagcctggtatctgctgatacatttgagcttcttgtagatagacttgagaaggaatcctacttagaaagccgctccagcggagcccagcagagcctgatcgatgaggacgcattttgctgcgtatgcttggacgatgaatgccacaattcaaacgttattctattttgtgatatttgcaacctagcagtgcaccaggagtgctacggcgtgccatacatcccggagggtcagtggctctgtagatgttgtctgcagtctccttcacgcccagtagattgtattttgtgtccaaacaagggaggggcctttaaacaaacttcagatggacactgggcgcacgtggtttgcgcgatatggattccagaggtctgttttgccaacaccgtatttctcgaaccgatagaaggaattgacaatatccccccagcccggtggaagttgacgtgctatatttgtaagcagaagggattgggggctgcaatccagtgtcacaaagttaactgctataccgctttccatgtgacttgtgcccaacgtgccgggctttttatgaagattgagcccatgagagagacaagcctaaacgggaccatcttcaccgtaagaaaaaccgcctattgtgaagcgcatagccctcctggcgcagctacagcccgtcgcaaaggcgacagtccacgcagcatcagcgagacgggagacgaggagggactcaaagagggagatggggaagaagaagaagaggaggaggttgaagaggaggaacaggaagcacaaggaggagtcagtggcagcctgaaaggagtacccaaaaagtcaaaaatgtcactgaagcaaaaaatcaaaaaagagccagaagaagccgggcaggacactcccagcactctccctatgcttgccgtacctcagattcctagctatagactcaacaagatttgttctggactttcatttcaacgaaaaaaccagttcatgcagagattgcacaattattggttgctgaagcggcaggcccggaatggagtcccactcattcgtagacttcactctcatttgcagtcccagagaaacgctgaacagagagaacaggacgaaaagacaagcgccgttaaggaggaactgaaatattggcagaagttaagacacgacctggaaagagcacgcctcctgattgaactcatcagaaaacgcgagaaactgaaaagggaacaggtcaaagttcagcaagctgccatggaactggaactgatgcccttcaatgtgctgctgagaaccactttagaccttctccaagagaaagaccccgctcatattttcgctgagccagtcaacctcagtgaagttcccgattatctcgaatttatttccaaacccatggatttctcaaccatgaggagaaagttagaaagccacctgtatcgaacccttgaagaattcgaagaagactttaatctcatcgttactaattgtatgaagtataacgcaaaggatacaattttccaccgagccgccgttcggctccgcgatctcggaggggccatattacggcacgcccgaaggcaggctgaaaacattgggtacgatcccgaacgaggtacgcatctgcccgaatcaccaaagctggaagacttttacagattctcctgggaggacgggcgatctcttctgttgcctttcgaagatcggggcgacctggaaccactggaactcgtctgggcaaaatgccgtggctatccatcttatcctgctcttatcatcgacccaaaaatgccaagagaagggctccttcacaatggggtacctattcctgtaccccccctggatgtgttaaaactcggtgagcagaaacaggcagaagctggagaaaaattatttttagtcttgttctttgacaataagcgcacctggcagtggttgccccgcgataaggttctgcctctaggagtagaggacacagttgacaagcttaaaatgctggaaggtagaaaaacaagtattcgtaagtcagtccaggtagcatacgatagagccatgatccatctgtcaagagtaagggggcctcatagctttgtgaccagttcgtatctctag

SEQ ID NO: 14654 - RNA, 2700 nt, synthetic construct
  misc_feature 1..2700: note = source = /note="Description of Artificial Sequence: Synthetic coding sequence"
  source 1..2700: mol_type = other RNA
atgttactactgttgttgcttgcacctctttttctgcgacctccaggtgcaggaggagcccagacgccaaatgctacctcagaagggtgccagattattcatccgccatgggagggcggcatccggtatagaggattaacgcgggatcaggtgaaggccataaattttctgccagtagattatgaaatagagtatgtctgcagaggcgagcgagaagtggtggggccaaaagtgcggaagtgccttgcaaatggaagttggacagatatggatactccaagtcgctgtgtgaaccgtaccccacactctgaaaggcgtgccgtctacataggcgctctctttcccatgtcaggcggatggccaggtgggcaagcttgtcagcccgcggtagagatggcactggaggatgtcaactctcgacgcgatatactccccgactacgaactgaagttgatacaccacgactctaaatgtgatcccggtcaggcaaccaagtatctatatgagcttctgtataacgatcctattaaaataattcttatgccggggtgctccagcgtatcaacattagtagctgaagccgcacgcatgtggaacttaatcgttctttcttatggaagctcctcaccagccctctctaacagacagcgctttcctacattttttaggacccatccttccgccacactccacaatcccaccagagtcaagttgttcgagaaatggggttggaaaaaaattgccactatccagcagaccactgaagtattcacctctacactggacgatttggaagaaagggtgaaagaagccggcatagaaatcacctttcgtcagagcttcttctccgatcccgccgtcccggttaaaaatctgaaaagacaagatgctaggataattgtcggactgttctacgagactgaggctcggaaagtgttctgtgaggtctacaaagaaagactgttcggcaaaaaatacgtgtggttcttaattggatggtatgcagataactggtttaagatttatgacccctccatcaattgtacagttgacgaaatgacagaagccgtggagggccacattactactgagattgtgatgttaaacccagcaaacactagatcaatttctaacatgacatcacaagaattcgtagaaaaactcactaaaaggctaaaaagacaccccgaagagaccggtggattccaagaagctcctctcgcctacgacgcaatctgggcattggcactggcactaaacaaaacaagtggtggaggcgggagatcaggggtgagattggaggactttaactacaataaccaaacaattaccgatcaaatttacagggccatgaatagttcctcctttgaaggcgtctcagggcatgtcgtcttcgatgctagcggatcacgaatggcctggacactcattgagcagctgcaaggaggatcctataaaaagatcggatactacgactccacaaaagatgatttaagctggtccaaaaccgacaagtggatcggcggctcccctccagccgaccagaccctcgtcatcaagacttttcggttcctgtcgcaaaagttatttatcagtgtatctgtcctatcttcgcttggcatcgtcctcgcagttgtgtgtctctcctttaatatatacaatagtcatgtgcggtatatccagaactcacaaccaaacctgaacaacctaactgccgtcggatgttccctcgctctggccgccgtctttcctcttggacttgatgggtaccatatcggcagaaaccagtttccctttgtctgccaggctagactctggctgttagggctgggtttctcattaggatatgggtctatgttcacaaaaatctggtgggtgcatactgtctttacgaaaaaggaagaaaagaaggaatggaggaaaacactcgaaccctggaagctatatgccaccgtgggactgcttgtcggaatggatgtgctgactcttgcaatttggcagatagttgatcctctccaccgtaccatcgaaacattcgcgaaggaagagcccaaagaggatatagatgtaagcatcttgccccaactggaacactgttcttccagaaagatgaacacctggctgggtattttttacggatacaaaggactgctgctgctgcttggtatcttccttgcgtacgaaactaagtccgtttcaaccgaaaaaatcaatgaccacagggccgtgggaatggccatttataatgtggcagtcttgtgcctcatcacagcccctgttactatgattctgtcctcccaacaggatgcagctttcgctttcgccagcttagctatcgtgttttcctcttacataactctagttgttttgtttgttcctaagatgcgccgcctcattacgcgcggtgagtggcaaagtgaggctcaagacaccatgaaaacaggctcctctacaaacaacaatgaggaagaaaagtcaagactgctggagaaggaaaaccgggaactggaaaaaattatagctgaaaaggaagaaagagtctctgaactcagacaccagctacaatccaggcaacagcttagatctagacgccatccacccactccccctgagccctctggtgggctgccacgtggacctccagagccccccgatagactctcatgtgatggatcgagagtgcatcttctttacaagtag

SEQ ID NO: 14655 - RNA, 537 nt, synthetic construct
  misc_feature 1..537: note = source = /note="Description of Artificial Sequence: Synthetic coding sequence"
  source 1..537: mol_type = other RNA
atggaaactttcccgctgcttctcctctccctggggttagtgctggccgaggcttccgaatcgaccatgaagattatcaaggaggagtttactgacgaagagatgcaatatgatatggccaaatcaggacaggagaaacagacaattgaaatactgatgaaccccattttgcttgtgaagaatacatcactgagtatgtcaaaggacgatatgtcaagcactctactgacctttagatctctccattacaacgatccaaaaggtaactcatcgggaaatgacaaggaatgctgcaacgatatgacagtttggcgtaaagtgagtgaggcaaatggctcctgcaagtggtcaaacaatttcatacgctcctccacggaagttatgaggcgggttcaccgggccccgtcgtgtaagttcgttcagaatcctggtataagctgctgcgagtctctagaactcgaaaataccgtctgtcagttcacaactgggaagcaatttccccggtgtcagtatcactcggtaacatctcttgaatag

SEQ ID NO: 14656 - RNA, 2184 nt, synthetic construct
  misc_feature 1..2184: note = source = /note="Description of Artificial Sequence: Synthetic coding sequence"
  source 1..2184: mol_type = other RNA
atgattttgagcctactattttcgttgggcggcccgctcgggtggggactgctaggagcttgggcccaggctagctccacttccctgtctgatcttcagtcgtcacgcacccccggcgtgtggaaagcggaagccgaagataccggcaaagatccagtcggtaggaactggtgcccctatccaatgtcaaaactggtgaccctgttagccctgtgtaagaccgaaaaatttctgattcactctcaacagccttgtccacagggagcgccggactgtcagaaagtgaaagtaatgtaccgcatggcacataagcctgtctaccaggttaaacaaaaggtgctgacatccctagcttggagatgttgtccaggatatactggtccaaattgtgaacatcatggacccatggcagtgtggtgttggcctgaaccagattcgctccaggctagactcggacaactccaacgcaatctgtcagaactgcacatgaccaccgcccgccgggaagaggaattgcaatatacgttggaagacatgcgcgccactttgactaggcatgttgatgagattaaagagctctatagtgaaagcgatgagacattcgatcagatttccaaggttgaacgtcaagtggaggagctccaggttaatcacactgcgttacgggaacttagagtgatcctcatggagaaatctttaatcatggaagaaaacaaagaagaggtggagagacagttactcgaactgaatttgactctgcaacatctccagggaggccacgccgacctaattaagtacgtcaaggattgcaattgccagaagctatatttagacctcgatgtgatacgcgaaggacaacgggacgctacccgcgctctcgaagaaacccaggtaagcctcgatgagagaagacaactggatggaagcagcctgcaagccttacaaaacgcagtggacgccgtgagcctcgccgtcgacgcacataaggctgagggagaaagggcacgtgcagccacctctcgactgaggagccaggttcaggctttggatgacgaagttggagcgttgaaggctgcagccgccgaagcaagacatgaggttagacagttgcattctgccttcgctgcgctgcttgaagatgcattgcgccacgaggcagtgttggccgcactgttcggagaggaagtgctagaggagatgagtgagcagacaccgggtcctttgcccttgagctacgaacagatccgcgttgccctccaggacgcagcatcgggtttgcaagagcaagccttagggtgggacgaattagccgcaagagtgaccgccctggagcaagcctccgagcccccaagacccgctgaacatctagagccctcccatgacgcgggaagagaggaggctgccacaactgcactagccggcctagccagagaattacaaagcttaagcaacgacgtgaagaacgttggccgatgttgcgaagccgaagccggggccggggccgcttcattaaacgctagcttacatggactccataatgccctgttcgctacgcaacggtcactagaacaacaccaaagacttttccattcactgttcggcaattttcagggactgatggaggccaacgtcagtctggacctggggaaactccaaaccatgctttccagaaagggcaagaaacagcagaaggacctcgaagcaccaagaaagcgggacaaaaaagaggccgaacccttagtggatatcagagtcaccggcccagtgccaggagctctcggagctgccctctgggaggctggttctccagtggccttttacgcctcattcagcgagggaaccgcagcactgcagaccgtgaagttcaatactacatatatcaatataggctcctcttactttcccgaacacggatatttcagggcaccggaaaggggcgtctacttattcgctgtgagtgtcgaattcggtcccggtcctggtacagggcagttggtatttggtgggcaccacagaacccctgtttgtactaccggtcagggctcaggctccacagccaccgttttcgcaatggcagaacttcagaaaggagagagggtgtggttcgaattgacacaagggtctatcactaagagatcactatccggcacggcctttggaggcttcctgatgtttaagacgtag

SEQ ID NO: 14657 - RNA, 828 nt, synthetic construct
  misc_feature 1..828: note = source = /note="Description of Artificial Sequence: Synthetic coding sequence"
  source 1..828: mol_type = other RNA
atgggctccgcaccttgggcaccagttctgttactcgctttaggcctccggggattacaggccggtggcgagtggcgcagaccacccgcccactctcctgtgccagccccacctttgagattcgccagcccacattcccctcagggtccaggcccccgattgcccggcgccctcctccctgccgcatcaggaccattgcagctcagagccctccgccagcaggacctaccttccgccttgcctggagtaggacaagtgctcggccccgggagaggtgcccatttgcttctccattgggaaagagggaggcgcgtggggttacgacagcaactgggattgaggcgcggcgcaggaggacgagcagggggatctaccggactgaggggcgcccctctgctgagggaagtggccgcagtgcgatgcgccgtccacgccgcaagggctcacggtgccgccgatggaggagcaggccccggaagactccgcagagctgcccctagggctacgacccggcctagaggaccaggctgtccacgccatagactacgctggaaattgtggggtgacgcgcagtgcctgccagaggatgaagttagtcctccaggcggcggcggcgcaggcggacagagagcccggtccagctgtggccgtcctagaagactgcaaccagtgctgccaggccgacacggtggatccctcagacatggccccctcggtgtgagacacctgcctgccgccgtgcgaagggagggccccgatcccgcactgcatgtgagacccgagtgtctgcatagagcaggacatgatggcctccccctgccacattag

SEQ ID NO: 14658 - RNA, 351 nt, synthetic construct
  misc_feature 1..351: note = source = /note="Description of Artificial Sequence: Synthetic coding sequence"
  source 1..351: mol_type = other RNA
atggctgcaggctccgcccccatgcagttacacttacgagccacaataagaatgaaagatggtctctgtgtccctagaaagtggatctaccacctgaccgaaggcagtactgatcttcgaacggaaggaagaccagacatgaaaacagaattgtttagctctagctgcccaggaggaatcatgctcaacgagactggacaggggtatcagcgattccttctttataaccggtcgccccatccaccagagaagtgcgtcgaggagtttaaaagcctgacatcatgcttagacagtaaagcctttctgttgaccccccggaaccaagaagcgtgtgaactgtctaataactag

SEQ ID NO: 14659 - RNA, 522 nt, synthetic construct; identical to SEQ ID NO: 13020
  misc_feature 1..522: note = source = /note="Description of Artificial Sequence: Synthetic coding sequence"
  source 1..522: mol_type = other RNA

SEQ ID NO: 14660 - RNA, 1482 nt, synthetic construct
  misc_feature 1..1482: note = source = /note="Description of Artificial Sequence: Synthetic coding sequence"
  source 1..1482: mol_type = other RNA
agcgaggctgtgtatctcaacgattcaacctacgacggacatacagttgggggtctgcagtacggagggctgggacagctcgcagatggcgttgtgggactggatgactttagaaaatcacaggaactgcgagtgtggccgggctatgattatgtcgggtggagcaaccacagcttttcttctgggtatgtggagatggaattcgaattcgacaggttgagagcctttcaggctatgcaggtgcactgcaacaacatgcatacattgggcgccagacttccagggggcgtggagtgtcggtttcgcagagggcctgccatggcatgggagggtgaaccaatgaggcataacctgggaggaaatctgggcgatccccgggctcgggctgtttccgtccctttaggtggcagagtcgctagatttctgcagtgtagattccttttcgcgggcccttggctgctattttcagaaatttctttcattagtgacgtggtgaataactccagcccagcactcggtggaaccttcccccctgccccctggtggccacccggcccccctccaactaatttctccagcctggaacttgagccccgaggtcagcaaccagtggcaaaggcagaaggcagccctacggcgatcttaattgggtgcctggtcgccatcatcctgctcttgctgctcataatagcgctaatgctttggaggttgcattggaggcggctcctctctaaggtacttgaatctcaccctcgtacaagaagtcccggccttgtgggaatacgaccaacccttcttccagtaagccctatggctctacgttgttgctctccaattcaacccactgcttccttttggcctcttactcccgttccactcgaggctcgtgctcctccacatcctcccggtccaaatccacctaccccacgcggagttacaggtgggaacacgtatgccgtcccggcgctccccccgggggctgtaggagatggtcctcctcgtgtggatttcccgcggtcaagactccgattcaaggaaaaactgggggaaggtcagtttggcgaggtgcacctatgtgaagtagactccccccaagacctggtgtcgttggatttccccctgaacgtgagaaaaggccacccgctgctcgttgccgttaaaatcctaaggccagatgctaccaagaatgcccgaaatgactttctgaaagaagttaagattatgagcaggctaaaagatccaaatattatccgattactgggagtttgtgtacaggacgatcctctttgcatgattactgattatatggagaatggggacctgaaccagttcctatctgcccatcagttggaggacaaagctgcggaaggggccccaggagacgggcaggcagctcaaggaccaaccatctcgtatcctatgttacttcatgtcgccgcacagattgcctccggcatgagatatctcgccacgctgaattag

SEQ ID NO: 14661 - RNA, 639 nt, synthetic construct
  misc_feature 1..639: note = source = /note="Description of Artificial Sequence: Synthetic coding sequence"
  source 1..639: mol_type = other RNA
atgggtcttcacctccggccctaccgagtcggcctcctcccagatggactgctattcttattgctcttactgatgctgcttgccgaccccgctctgccagccggccgccacccacccgtagttctaggagataataatcgcattccggttattggccctttgaagatcagggagcagcagaggtctgccgtaagtacgagttggttgctgccttacaactacacatggtctccagagaaagtgttcgtgcaaaccccaaccataaattacactctacgcgactaccggaagttctttcaggacataggctttgaggacggatggctaatgcggcaagatacagaaggcctagtggaagccaccatgccaccaggtgtgcagcttcattgcctctatggaacaggagtgccaacgcccgattccttttattacgaaagttttccggacagggatcccaagatctgctttggggatggtgatggaacagtcaatttaaagagtgcattacagtgccaggcctggcaaagtagacaggagcaccaggtgctgctgcaggaattgccaggaagtgagcatattgaaatgttagctaatgcgaccactctggcttatctgaaacgagtgttacttggaccatag

SEQ ID NO: 14662 - RNA, 654 nt, synthetic construct
  misc_feature 1..654: note = source = /note="Description of Artificial Sequence: Synthetic coding sequence"
  source 1..654: mol_type = other RNA
atgagcgacctgctgctgctagggctgattggcggtctcactctgctgctcctgttgaccctcctcgctttcgctggttactcaggtctactggcgggggtcgaggttagcgcgggttccccccctatacgtaacgtgaccgtcgcctacaagtttcacatgggcctctacggagagaccggccggctgtttactgagtcctgctctatttcaccaaagttaagatccatcgccgtttattacgataatccacacatggtcccccctgacaaatgcagatgtgccgtaggatccattctctctgaaggagaagaaagtccaagtcccgagctcatcgatctttaccagaaattcggctttaaggtattctccttccccgctccaagccacgtggtgaccgccaccttcccatatactacaatcttaagtatctggcttgcgacccggagagtccaccctgctcttgacacttacatcaaagaacggaaattatgtgcctatccccgactagaaatctaccaagaggatcagatccatttcatgtgtccactggcccgccagggagacttctacgtgcctgaaatgaaagaaacagaatggaagtggcgcggactggtggaggcaatcgatactcaggtggatgggacagggtag

SEQ ID NO: 14663 - RNA, 345 nt, synthetic construct
  misc_feature 1..345: note = source = /note="Description of Artificial Sequence: Synthetic coding sequence"
  source 1..345: mol_type = other RNA
atgaaaactttcacatggacccttggcgtccttttctttctgttagtcgacactgggcactgcagaggcggccagtttaagatcaagaagattaatcaaagacgataccctcgagctactgacggcaaggaggaagctaagaagtgcgcatacacatttctcgtgcctgagcagcgcattacggggccaatttgcgtgaataccaagggacaggacgcgtccactatcaaggatatgattaccagaatggatctagaaaatctgaaagacgtactgagccgccagaagagggaaattgatgtgcttcagttggtggtggatgtggatggtaatatagtcaactag

SEQ ID NO: 14664 - RNA, 870 nt, synthetic construct
  misc_feature 1..870: note = source = /note="Description of Artificial Sequence: Synthetic coding sequence"
  source 1..870: mol_type = other RNA
atgttcgtgctgctgtatgtgactagttttgccatctgtgcctcagggcagcctaggggaaaccaacttaaaggagaaaactatagcccaaggtacatttgctcaatcccaggactgcccggcccgcctggcccaccgggcgcaaacggctcaccgggtccccatggccgcatcggtttgcctggaagagacggacgggacggaagaaaaggagagaagggggagaaggggactgcaggactgcgcgggaagacaggaccgttaggccttgccggagagaaaggcgaccagggggagaccggaaaaaaaggcccaatcggccccgaaggagaaaagggcgaagtgggccctattggtccaccaggccccaaaggcgaccggggagagcaaggcgacccgggcctcccaggcgtttgtcgatgtggatccatagtcctgaaatctgctttttccgtgggaattacaacttcatacccagaggagagacttcctatcatcttcaacaaagttctctttaacgagggcgagcactacaaccctgcaactggcaagttcatctgtgcttttccaggaatttattacttttcatacgatattactctggcaaacaagcaccttgcaattggattggttcacaatggccagtatcgcattaaaacttttgacgcaaacacaggcaaccacgacgtggcatccggcagcacagttatctaccttcagcccgaagacgaggtatggctcgagatcttcttcacagaccagaacgggttgttttccgatccaggatgggccgattctttgttcagtggattccttctgtacgtggatacagattacttggacagcattagcgaagacgacgagctttag

SEQ ID NO: 14665 - RNA, 1002 nt, synthetic construct
  misc_feature 1..1002: note = source = /note="Description of Artificial Sequence: Synthetic coding sequence"
  source 1..1002: mol_type = other RNA
atggtatccaaaagtcggtggaagttactcgcaatgctagcattagttttagtggtcatggtgtggtatagcataagccgggaagacagatatatcgaactcttctatttccccataccagagaaaaaggagccatgtttacagggagaggcagaatcaaaggctagtaaacttttcgggaattactctcgtgaccaaccaattttccttagactagaggattatttctgggttaagactccttccgcctacgaactgccctacggcacgaaggggagtgaagacctcttgttacgggtgctcgcaatcacatcctcaagcattccaaagaacatacaatccctcaggtgtcggcgttgcgtcgtcgttgggaacggtcatagattaaggaactcttcactaggggatgccatcaacaagtatgatgtagttattcgactgaacaacgccccagtcgcaggatacgagggagatgttggctcgaagaccaccatgcgcttgttttatcccgagagtgctcatttcgaccccaaagtggagaacaatccagatactctgttagtcctggtcgctttcaaggcaatggatttccactggatagaaaccatcctctccgataagaaacgtgtccggaaaggcttttggaagcagccacctctcatttgggacgtcaatccaaagcaaattagaattttgaatccatttttcatggagattgcggctgataaacttctctctctacctatgcagcagcctcgcaagataaagcagaaaccgacaaccggcctacttgctatcacactcgccctccacctgtgtgacctcgtgcacatcgccgggtttgggtacccagacgcctataataaaaagcagacgatccactattatgagcagatcactctgaagagtatggcaggtagcggacataacgtatcacaggaagcacttgcgattaagagaatgctggagatgggtgcaataaaaaatttaactagcttttag

SEQ ID NO: 14666 - RNA, 531 nt, synthetic construct
  misc_feature 1..531: note = source = /note="Description of Artificial Sequence: Synthetic coding sequence"
  source 1..531: mol_type = other RNA
atgcgtcttctgatattgacttgtcttgtggctgtagcactggctcgacctaaactgccactccgctaccctgaaagactgcagaacccttctgaatctagcgaaccaatacctctagaatcacgggaagaatacatgaatgggatgaatcggagaaacatcttacgggagaaacagacagacgaaattaaagatacccggaatgagagtacacagaattgcgttgtcgcagaacctgagaagatggagagttctatctctagctcttccgaagagcagttttgtcgactgaatgaatacaatcagctccaactgcaggccgcccacgcccaggaacaaattcgacgcatgaatgaaaattcacatgtgcaggttccatttcagcagctcaaccagttggccgcctacccctatgcagtgtggtactatcctcaaatcatgcagtacgtaccttttcctccattctccgatatttctaatccaactgctcacgaaaattatgagaagaataacgtcatgctccaatggtag

SEQ ID NO: 14667 - RNA, 279 nt, synthetic construct; identical to SEQ ID NO: 13028
  misc_feature 1..279: note = source = /note="Description of Artificial Sequence: Synthetic coding sequence"
  source 1..279: mol_type = other RNA

SEQ ID NO: 14668 - RNA, 1656 nt, synthetic construct
  misc_feature 1..1656: note = source = /note="Description of Artificial Sequence: Synthetic coding sequence"
  source 1..1656: mol_type = other RNA
atgacgtggcgcatgggtcctagattcaccatgctactcgccatgtggttagtttgcggaagtgaacctcatcctcatgccacaatccgtggatcccacggtggaagaaaggtcccattagtgtcccccgatagttcccgtcccgccagattccttagacataccggccgaagtagaggtattgagcgctccaccctggaagaaccgaatttacaacccttacagcgaagacgatctgttcctgtacttcgcctggcacgtccatcccgatttagagacaacaggatggacaggagggagcacggccacagggaccctaatgttgtacctggcccacccaaacctgcaaaagaaaaacccccgaaaaagaaagcgcaggataagatattatctaatgaatatgaagaaaaatacgacctgagcagacccaccgcctcccaactagaggacgaactacaagtaggtaacgtaccactgaagaaggcaaaagaaagtaaaaagcatgagaagctggagaagccagaaaaggagaagaagaaaaagatgaagaacgaaaacgctgacaagctgcttaagtcagaaaaacaaatgaaaaagagcgaaaagaaatctaaacaggagaaagagaagtctaagaagaaaaagggaggaaagacagagcaggacgggtatcagaagcccaccaataaacacttcacccagagcccaaaaaaatcagtagctgacctgttaggaagtttcgaaggtaagagacgcctattgctgatcacagcccctaaagctgaaaacaacatgtacgtgcagcaacgtgacgagtacttggaaagcttctgtaaaatggccacaagaaaaatctcagtcatcactatcttcggacctgttaacaatagcaccatgaaaattgatcactttcaattggacaatgaaaaacctatgagagttgttgacgatgaagatctggtggaccagcgcctaattagcgaactccggaaagagtacggaatgacttataatgacttttttatggtgctgactgatgttgacctaagagtcaaacagtactacgaagtccccattaccatgaagtcggtgtttgatttgattgacactttccagtcccgcatcaaagatatggagaagcagaagaaggaagggatcgtatgtaaggaagataagaagcaatccttagaaaactttctgtccaggtttcggtggcgtcgacggttactggttatatctgctcctaacgatgaggattgggcgtattcacagcagctgagcgcactgagcggacaggcatgcaattttggtagctctgtggtcgagagggaagacgtgcctgcacacctggtaaaggatattagaaactatttccaagtgtcccctgagtatttttctatgctacttgtaggaaaggatggcaatgtcaagtcttggtacccgtccccaatgtggagcatggtaatagtatacgatttgatagattctatgcagctgcgcagacaggagatggcaatccaacagagtctgggaatgagatgccctgaagacgaatatgctggttatggctaccacagttaccaccagggttaccaggatggatatcaggatgactaccgacaccatgaatcataccatcacggatatccttactag

SEQ ID NO: 14669 - RNA, 1245 nt, synthetic construct
  misc_feature 1..1245: note = source = /note="Description of Artificial Sequence: Synthetic coding sequence"
  source 1..1245: mol_type = other RNA
atgggagtgagcaagttagatattctctaccgaagattattattgaccaaattgtttatacgaggatggggaagaccagaagatctgaaacgtctgttcgaattccgcaaaatgatcggcaacagagaacggtgtcaaaatctggtatcttccgattaccccgtccatattgacaagatcgaagaacaatcagattgcaaaatcctcgatggacatttcgtgagtcctatggcacattacgttcccgatataatgcccattgagagtgtgattgctcggtttcagttcattgtgcctaaagaatggaatagtaaataccgccctgtctgtattcacctagccggaacaggggatcaccattattggagaaggaggactttaatggcaagaccaatgatcaaagaagcgcgcatggccagccttctgttagagaatccttactacgggtgtcggaaacctaaggaccaagtgcgtagttctctgaaaaatgtttctgacttgttcgtgatgggtggagccttggtcctggaaagcgccgccttgctgcattggctagaacgagagggctacgggccactcggcatgaccggaatcagcatggggggtcacatggcctcgctcgctgtctcgaactggccaaagcccatgccactgattccatgcctctcctggtcaaccgcttctggcgtgtttaccaccactgactcttttaaaatgggacaggagttcgttaaacacttcacctcatctgccgataagctaactaacctgaacttggtgagccgcaccctcaacctggacatctctaaccaggtcgtgtcacagaaaccggccgactgtcacaattccagcaagaccagcgtatctgccacttctgaaggcctgttgttgcaggatacgagtaaaatgaagcggttcaaccagactctttctactaacaaaagcggatacacctctcgcaacccccagagctatcacctattaagcaaagaacaatcccgcaattctctcaggaaagaaagcctaattttcatgaagggtgtgatggatgaatgtacccacgtagcaaatttctctgtacccgtcgatccctcgctgattatcgttgttcaggctaaagaagacgcctatattcctagaaccggcgtgcggagtttgcaggagatctggcccggatgtgaaattaggtatctggaaggtggtcatataagcgcatatctttttaaacagggactgttcaggtag

SEQ ID NO: 14670 - RNA, 912 nt, synthetic construct
  misc_feature 1..912: note = source = /note="Description of Artificial Sequence: Synthetic coding sequence"
  source 1..912: mol_type = other RNA
atgagtgaaccacagcctgatctggaaccgcctcaacacggcctctacatgctttttcttttagtgctggtgttctttttgatgggattagtgggctttatgatctgtcatgtgctgaagaaaaagggttacagatgcaggacgtctaggggatccgaaccggatgacgctcaacttcaacctcctgaggacgatgacatgaatgaggatactgtcgagaggatagtgcgatgtattattcagaacgaagcaaatgcagaggcacttaaggagatgctcggagactcggaaggggagggcacagtacagttaagttccgtggacgctacatcttcacttcaggatggtgccccttcccatcaccacaccgttcatctcggcagtgctgctccctgtttgcactgctcccggtccaaaagaccgccattagtgcgccagggcaggtctaaggaaggtaaatctcgcccgaggaccggtgagacaacagttttttccgtagggcggttccgagtgacacatattgaaaagaggtacggactgcatgagcatcgcgacggaagccccaccgatagaagttggggttctggtggcggacaagaccctggcggtgggcaaggatctggcggcggacagcctaaggctggcatgcccgccatggaacgcttaccccctgaacgcccccagccccaagtcttagcgtctccacccgtccaaaatgggggcctcagagatagtagcttgacacccagggccttggaggggaacccacgcgcttccgccgagcccactctccgcgccggcggccgaggaccctccccaggactacccacacaggaggctaatggacagccttctaaaccagatacgagcgaccaccaagtgtctttgcctcaaggggcgggtagtatgtag

SEQ ID NO: 14671 - RNA, 444 nt, synthetic construct
  misc_feature 1..444: note = source = /note="Description of Artificial Sequence: Synthetic coding sequence"
  source 1..444: mol_type = other RNA
atgggaccagaagccctctcttcacttctgttgcttctgctggtcgcgagcggggacgcagacatgaaaggccacttcgaccccgcaaagtgtagatatgctctaggaatgcaagataggacgattcccgactctgatatttctgccagtagctcctggagcgacagtaccgctgcgcgtcactctagactagagtccagcgatggcgacggcgcgtggtgtcctgccggaagcgtattcccaaaggaagaagagtacctccaagtcgatctccagcgccttcatctagtcgctctggtgggtactcaggggcgccacgcaggcggcttaggtaaggaatttagtcggtcttacaggctcagatattctagggacggcaggcggtggatgggatggaaggatcggtgggggcaagaagtaatcagtggtaatgaggatccatag

SEQ ID NO: 14672 - RNA, 1173 nt, synthetic construct
  misc_feature 1..1173: note = source = /note="Description of Artificial Sequence: Synthetic coding sequence"
  source 1..1173: mol_type = other RNA
atgggcgcaacgactatggaccagaagtccctgtgggcgggtgtagtcgtgcttctgctgctccagggaggatcagcctataaactggtgtgttacttcactaattggtcccaagacaggcaagaacctggcaagttcacccccgaaaatattgatccatttctgtgctcccacctgatctactcttttgcctccattgaaaacaataaagtaattataaaagacaagtccgaagtgatgctgtaccaaaccattaattccctaaagaccaaaaatccaaagttgaagattttgttgagcataggtggctacttgttcggctctaaaggctttcacccgatggtggattcaagtacttcgcgtctggaatttataaattcgataatcctgttcctgcggaaccataattttgatggactggacgtcagttggatatacccagatcaaaaggaaaacacacattttacagtgttaattcacgaactggccgaggcatttcagaaagactttacaaagtccaccaaagaaaggctgcttttgaccgcaggtgtttctgccggtaggcaaatgatcgacaattcataccaggtcgaaaagctcgccaaggacctcgacttcataaatctgctgtctttcgatttccatgggtcatgggagaagccattaattaccggacacaactcgccactctctaagggttggcaggaccgcggcccctcctcctactataatgttgagtacgctgtgggatattggattcataagggaatgccatctgaaaaagtagttatgggcatccctacttacgggcacagcttcacacttgcatccgcagagacaactgttggagcaccagctagcggccccggcgcagccggaccgatcactgaaagctccggatttctagcgtactatgagatttgccaatttctgaaaggtgctaagataactcgcctccaggatcagcaggtcccttacgccgtaaagggtaaccaatgggttgggtacgatgatgtcaaaagcatggagacaaaggtacagttcctcaagaacctcaacctcgggggagccatgatttggagtatcgatatggatgactttactggaaaatcctgcaaccagggcccctatccccttgtccaagcagttaagcggtctttaggaagtctatag

SEQ ID NO: 14673 - RNA, 297 nt, synthetic construct; identical to SEQ ID NO: 13034
  misc_feature 1..297: note = source = /note="Description of Artificial Sequence: Synthetic coding sequence"
  source 1..297: mol_type = other RNA

SEQ ID NO: 14674 - RNA, 600 nt, synthetic construct
  misc_feature 1..600: note = source = /note="Description of Artificial Sequence: Synthetic coding sequence"
  source 1..600: mol_type = other RNA
atggcatggggcggagttcacacctgctgcttccacctgtgctgttgctgttcctggccccagggcgctgttcctgaagagctccacaagcacccaggacagactctgttgttgcaatgccagtattctcctaagagagggccatatcagcctaaatcctggtgtcagcagacttcacctagcagatgcacactgttagttacttcttcaaaaccatggaccgccgtgcaaaaatcacattacacaatctgggataaacctaatgcagggtttttcaacataacaatgattcagctaactcaaaatgattcaggcttttattggtgtggaatctataatgccagtgagaacattataacggtccttcgaaacatcagcttggttgtgagtcctgctcctacgacttctcctatgtggactctgccctggcttccaacatcgactgcatgggaaccccagattcaagaaattaaatttcgagccccaactgactcaacgctttggaaatctcgcgcacctgcatgcctagggagtggcgggccgaggtttctcgtgcttgtgctgtgcggattgttattagctaaaggcctgatgctgtag

SEQ ID NO: 14675 - RNA, 2025 nt, synthetic construct
  misc_feature 1..2025: note = source = /note="Description of Artificial Sequence: Synthetic coding sequence"
  source 1..2025: mol_type = other RNA
atgacaacagatgacaccgaagtaccagccatgactctcgctcctggacacgcagctctcgagacccaaaccctttcggctgaaacctcatcacgggcatctacccctgcgggacctatcccagaagctgaaactaggggcgccaaacgcatatcgccagccagggaaactagatctttcaccaagacatcccccaatttcatggtactgattgctacctccgtggagacaagcgccgcttcaggtagcccagagggtgctggaatgacaactgtacagacgatcaccggttccgacccaagagaagccatcttcgacacactctgtactgatgacagctctgaggaggcaaaaaccctcaccatggatatactgactctcgcccacacctccaccgaggctaaaggtttaagcagtgagagctcagccagttctgactccccccatcctgtgattaccccatcccgagcctctgagtcttccgcttcttctgacggcccccacccagtcatcaccccttcacgcgcctctgagagtagtgctagcagcgatggtccgcacccagtgattacgcccagcagggcctccgaatcctctgccagttcagacggtcctcatcctgttataaccccttcaagagcatccgaatccagtgcctccagcgatggacctcatccagtgattactccttcacgtgcatctgagtcaagtgcatcttcggacggccctcatcccgttataactcctagtagagcaagtgagtcatctgcatcaagcgatggcccccaccctgtgatcaccccctctcgggcttctgaaagctctgcctcctctgacgggccacaccctgttatcaccccatcaagagcttctgaatcatctgcctcatccgacgggcctcaccctgtaatcactccgagtcgggcctcagaatcctctgcatctagtgatggactccacccagtcattacaccctcccgggctagcgaatcctccgcctcttccgacggaccgcatccagtaataactcccagccgggcctctgaatcttctgcttcatctgatggaccccacccagtaattactcctagctggagcccaggcagtgacgtaaccctgttagcagaagccctggtgacggtgacaaatatcgaggtgatcaattgttcaattaccgagatcgaaactactacctctagtattcctggagcatccgataccgacctgatccctaccgagggagtcaaggctagttccacgtctgatccccctgcactgcccgacagcaccgaagccaagccgcatattacggaagttaccgccagtgccgaaacactctccactgcagggacaacagaatccgccgcaccagatgccactgtgggtacacccctccctacgaactcggccaccgaacgcgaagtgaccgcccccggcgccacaacactctcaggtgctctagtgaccgttagccgtaaccccctggaggagacaagcgccctatcagtcgaaacaccatcctatgtcaaggtcagcggtgccgcaccagtcagcattgaggccggctccgccgtcggaaaaacaacaagttttgctgggagcagtgcaagttcttattccccgtcagaggctgccttaaaaaattttacacccagtgaaacacctaccatggacattgccacaaaaggcccatttcctactagtcgagaccccctaccatccgtccctccaactaccactaacagctcgcggggcaccaattctacactggcaaaaataacaacatccgccaaaacaaccatgaagccacccactgctaccccgactactgctaggacccgccctacaacagacgtcagtgccggcgagaatggaggattcctgctacttaggcttagcgtcgcatctcccgaagacttgacagaccctagagtagccgagagactaatgcaacagctgcatcgcgagctccacgcgcacgcaccacactttcaggtgagcctactccgggtgagacgcggctag

SEQ ID NO: 14676 - RNA, 738 nt, synthetic construct
  misc_feature 1..738: note = source = /note="Description of Artificial Sequence: Synthetic coding sequence"
  source 1..738: mol_type = other RNA
atgcaggccgcatggttgcttggtgcactggtcgtgccccagctgctgggatttggacatggcgcacgcggagctgaaagggagtgggaaggaggctggggaggggctcaagaagaggagagggaaagggaagcactcatgctgaaacacctccaggaggcactcggcctgcccgctggacggggcgatgaaaaccccgccggaacagttgagggtaaggaggattgggagatggaggaagatcagggggaggaagaagaggaagaggctacaccaacgccaagctccggaccttctccttccccaacaccagaagacattgtgacatatatactagggagactcgcaggcctggatgctggtctgcaccaattacacgtccgactgcatgccctcgacaccagggtggtggaattgacccaaggcctccgacagcttcgaaacgcagccggcgatacaagagacgctgtgcaagctcttcaggaggcccagggacgcgccgagagagaacacggaaggttggaaggatgcttgaagggcctgcgtctgggacacaaatgcttcctgctcagcagagacttcgaagctcagccaagcgctagcccccatccactttcacctgatcagccaaacggcggaactctcgaaaattgtgtggcacaggccagtgatgatggctcctggtgggatcacgactgtcagcgcagattgtattacgtgtgtgagtttcctttttag

SEQ ID NO: 14677 - RNA, 279 nt, synthetic construct; identical to SEQ ID NO: 13038
  misc_feature 1..279: note = source = /note="Description of Artificial Sequence: Synthetic coding sequence"
  source 1..279: mol_type = other RNA

SEQ ID NO: 14678 - RNA, 177 nt, synthetic construct; identical to SEQ ID NO: 13039
  misc_feature 1..177: note = source = /note="Description of Artificial Sequence: Synthetic coding sequence"
  source 1..177: mol_type = other RNA

SEQ ID NO: 14679 - RNA, 732 nt, synthetic construct
  misc_feature 1..732: note = source = /note="Description of Artificial Sequence: Synthetic coding sequence"
  source 1..732: mol_type = other RNA
atgggacctgaagccctgtctagcctgctgctcttattgctcgtcgctagcggcgacgctgatatgaaggggcactttgaccccgccaaatgcagatatgctctcggaatgcaagacaggactatccccgactctgatattagcgcctcctcaagctggagcgacagtaccgcggccagacactcaagactggagtcctccgatggagatggagcatggtgtccagcaggtagtgtgtttcctaaggaagaagaatatcttcaagtggatttgcagcgactccatctggtggccttggtgggcacccagggacggcacgccggaggtctcgggaaggaatttagcaggagttataggctgcgctattccagagacggaagacgttggatgggctggaaagacaggtggggacaagaggtgatctccgggaatgaggatcctgaaggtgtggtattaaaagatttggggccccctatggtcgcgcgcttagtaaggttctatccgagggccgatcgggtcatgagcgtgtgcctgcgggtcgaactgtatggatgcttgtggagggactgtagtatgggcgtatgggcttcctggcagatggtatggtgggggtggatgactttgggtagggtgaggtcctgtggcagcggccaggctatgactatgtgggacggggcgacgaccgcatccccagtcgcaatgtggaggtggagccttagtctgaccgggtag

SEQ ID NO: 14680 - RNA, 2535 nt, synthetic construct
  misc_feature 1..2535: note = source = /note="Description of Artificial Sequence: Synthetic coding sequence"
  source 1..2535: mol_type = other RNA
atgggacctggagccccgttcgcccgtgttggctggcctctacctctgctggtcgtaatggctgcaggcgttgcccctgtctgggccagccacagccctcatctcccaagacctcactccagagtgccacctcacccttcctccgaaaggcgtgccgtctacatcggtgctctgttccccatgtcaggcggctggcccggcggtcaggcttgccaaccagccgtcgagatggctctggaggacgtgaattcaagacgcgatattctgccagattacgaactcaagctgattcatcacgacagtaaatgcgatcccggtcaagcgacgaaatatttgtatgaactgctttacaatgatcccattaagatcattctgatgccgggttgttcttcagtatcaactctggttgcagaagccgcgcggatgtggaacttaattgtcctctcttacggttcatcctcccctgctctgagtaatcgacaacggtttcctactttctttagaacgcacccttcagccactctccacaaccctactagagtaaagctgtttgagaagtggggatggaagaagatcgcaacaattcagcagacaacagaggttttcacttcaacattagacgacctggaggagagagtcaaagaggcgggaattgaaattacctttagacagtcattctttagcgaccccgctgtccctgtgaagaacctgaaaaggcaagacgctagaatcatcgtcggcttgttttacgaaaccgaagctagaaaggtattttgtgaagtctacaaggagcggttgtttggaaaaaagtacgtttggtttctgattggatggtacgctgacaattggtttaagatctacgacccatccatcaattgtacggtagacgagatgacagaggcagtagagggtcatataaccacagaaattgtgatgttgaatccggcaaacactagaagtatctctaacatgactagtcaggagttcgtcgaaaaactcaccaaaaggcttaagcggcaccccgaggaaaccggaggcttccaggaagcccctttggcatacgatgcaatttgggccctggcactcgctctcaacaagacttccggtggcggtggtcggtccggcgtcagactcgaggattttaactacaataaccagacaataacagatcagatttaccgggctatgaacagctccagctttgagggagtatcagggcacgtcgtttttgacgcgtcaggtagccgcatggcttggaccctgatcgaacagttacaaggaggctcttataagaaaatcggttactatgatagcaccaaagatgacttgtcatggtccaagacagacaagtggataggaggctcaccacctgctgaccagactctcgtgatcaaaacatttagattcttatcccaaaaattgtttatatctgtgtcggtcttgtcctccctgggcattgtgcttgccgtggtgtgtcttagctttaatatctacaacagccacgtacgttatatccaaaattcccagcccaacctcaataatctaaccgcagtaggttgcagtctggcactcgccgcagtctttcccctgggtctggacggctatcatattggaagaaatcagttcccctttgtgtgtcaagcccgtctgtggcttttgggccttggtttttctctgggttacggttccatgttcacaaagatatggtgggtgcatacggtgtttactaaaaaggaagagaagaaagaatggcgtaagaccctggagccttggaagctctacgcaacagtcggtctgttggtcggcatggacgtgcttactctcgctatatggcaaatagttgaccctctgcacaggaccatcgaaacctttgcaaaagaagagcccaaagaagatatcgatgtgtccatccttcctcagttggaacactgcagttctcgcaaaatgaacacttggctcggcatcttttatggttacaagggtctattactgcttttaggaattttcctggcttatgaaactaaatcagttagcacagaaaaaattaacgaccatagagcagtcggcatggcaatttacaatgtcgcagttctttgtctgattacggctcccgtcactatgattctgtcgtctcagcaggatgcagcgttcgctttcgccagcctggctatcgtgtttagttcctacatcacgttggtcgttttgttcgtgcctaagatgagacgtttgattacccggggcgagtggcaatcagaagcacaagacacaatgaaaaccggaagttccacgaacaacaatgaagaagagaagagtcgactgctggaaaaagaaaatagagagttggaaaagatcatcgctgaaaaggaggaaagggtgtccgagctgcggcatcagttacaaagccgccaacagctaagatctagacgccatccacctacccctcctgaacctagcggcggattacccagaggaccaccagagccccctgatagactgtcttgcgatgggagtagagtgcatttactgtacaaatag

SEQ ID NO: 14681 - RNA, 921 nt, synthetic construct
  misc_feature 1..921: note = source = /note="Description of Artificial Sequence: Synthetic coding sequence"
  source 1..921: mol_type = other RNA
agacgaacttgtgctggacctggcagagcaggaggagcacgatcagcctcctggatgtcaagactcagggccctgcttggactcggccttttagtagccgggagccgggtgccacgaatcaagtcgcagactatcgcttgtcgctctggaccaacttggtgggggccccagcgtttgaactccggcggtcgatgggattcggaggtaatggccagcacagtggtgaaatatctatcacaagaagaagcacaggctgtcgaccaggaactgttcaatgagtatcaattttcagtcgatcagctcatggaactcgccggcctctcgtgtgccaccgccatcgcaaaggcctatccaccgactagtatgtctcgctccccacctacggttctggtcatatgtggccctggaaataatggcggcgacgggctcgtgtgcgccagacatctgaaattattcggttatgaacccaccatatattatcccaaacgacctaacaaacccttgttcaccgccttagtaactcagtgccagaagatggatattccgtttcttggtgaaatgccagcagagcctatgactatcgacgaactgtacgagcttgtagtggatgctatcttcggcttcagcttcaaaggagatgtccgcgaacccttccattcgatcctatctgttctcaagggcctgactgtcccaatagcgagtatcgacataccttctggctgggacgtcgagaagggaaatgccggaggaatacagcctgatctgttgatctcgcttacggctcccaaaaagtccgccacccaattcaccggacgctaccattacctaggggggagattcgtaccacctgccctcgaaaagaagtaccaattaaacctgccgccttatccggacaccgagtgtgtgtacagactccagtag

SEQ ID NO: 14682 - RNA, 1137 nt, synthetic construct
  misc_feature 1..1137: note = source = /note="Description of Artificial Sequence: Synthetic coding sequence"
  source 1..1137: mol_type = other RNA
tagtacagcggtgactacatggagcccgagaaaccgggagcgcctctgttgccacccccacctcagaattcagttccgcactacgccgaagccgacatcgtcacactccaaggcgtgactggcggaaacacctacgctgtccctgccttgccacccggggccgtgggcgatggacccccccgcgtggacttcccccgatccaggttgcgatttaaggaaaagcttggcgagggacaatttggagaagtgcacttgtgcgaagttgatagccctcaggatctagtgagtctcgactttccattgaacgtacgcaaaggacatccgctcttagtcgctgtgaagattctgcgcccggacgcaaccaaaaacgcatcttttagtcttttttctcgcaacgatttcctcaaggaagtgaagatcatgagccgacttaaggaccccaatataatccgcctcttaggagtgtgtgtccaagatgacccgctttgtatgatcacagactacatggaaaacggagacctgaatcagttcctgtccgcgcatcagctcgaggacaaagctgccgagggggctccaggggatggccaggcggctcaggggccgacgatctcgtatccaatgttacttcacgtggccgcccagatcgcaagcgggatgagataccttgctaccctgaattttgtacacagagacctggctacccgcaactgtttggttggcgagaatttcacgatcaagattgctgacttcggcatgtcaagaaacctatatgcaggcgactattatcgcgtacaaggcagagcagtgctgcctatacggtggatggcatgggaatgcatcctgatggggaaattcactactgcttcagatgtgtgggcttttggtgttaccctttgggaagtcctgatgttatgtagagcacagcccttcggacaactcaccgatgagcaagtaattgagaatgcaggggagttctttagagaccagggaagacaagtctacctctctaggccaccagcgtgcccccagggactgtacgagctgatgcttcgttgctggagtagagaatctgagcaaagaccacccttctcacaactgcaccgtttcctagcagaggatgccctcaacaccgtgtag

SEQ ID NO: 14683 - RNA, 762 nt, synthetic construct
  misc_feature 1..762: note = source = /note="Description of Artificial Sequence: Synthetic coding sequence"
  source 1..762: mol_type = other RNA
atggctccttggtcccacccatcagctcaactccagcccgtcggcggtgacgctgtctctcccgccctcatggttcttttgtgtctcggcaatctcagcaaggcaaccctgtgggcagagcccggttcagttatcagcaggggaaatagcgtaactataagatgtcagggcaccttagaggcgcaagagtacaggctggtcaaggaaggaagtcccgagccctgggacactcagaaccctctcgagcccaagaataaggcgagatttagcatcccatccatgactgaacatcatgccggaaggtaccggtgttactactacagccccgctggctggtccgagcccagtgacccacttgaactggtcgttaccggtttctacaataaacctaccctatctgccctgccgagtcccgtggttacaagcggcgaaaatgtaactctgcaatgtgggagccgtttacgatttgaccgatttattctaaccgaggaaggcgatcataaactgtcatggacactcgactcacagcttacaccatccggtcagttccaggcacttttccctgtaggcccagtcacaccgagccatcgctggatgttgcggtgctatggaagccgcagacacatcttacaagtatggagcgaaccctccgatcttttagaaattccagtaagcggagaagaagctaccgtcttttcatctacaatacagggctctcagaccggatgtggcgagctctatcgccagggaagcccatgctag

SEQ ID NO: 14684 - RNA, 288 nt, synthetic construct; identical to SEQ ID NO: 13045
  misc_feature 1..288: note = source = /note="Description of Artificial Sequence: Synthetic coding sequence"
  source 1..288: mol_type = other RNA

SEQ ID NO: 14685 - RNA, 1311 nt, synthetic construct
  misc_feature 1..1311: note = source = /note="Description of Artificial Sequence: Synthetic coding sequence"
  source 1..1311: mol_type = other RNA
atgaagttccagggccctttagcttgtctcctcctagcactttgcctggggagtggggaggccgggcccctccagtccggcgaggagagcactggcacaaacattggcgaagccttgggccatggtttaggcgatgctttgagtgagggagtgggcaaggcaattggcaaggaagctgggggggccgccggatctaaagtgagcgaagcactgggccaaggtacccgagaagcagttggaacaggtgtgcgccaagttcccgggtttggggttgcagacgctttaggtaacagagtaggcgaagctgcacatgccctcggtaatacgggccacgagatcggccggcaggcagaagacgtcattagacatggggcagacgctgtgagaggaagttggcagggtgtgccaggacacaatggagcgtgggaaacgtcaggcggccacggcattttcggatcacaaggaggcctcggtggacagggtcagggcaacccaggaggcctaggcacgccgtgggtgcatggctaccccggaaactccgcaggttcttttggtatgaatccacaaggtgccccttggggtcagggggggaacggcggcccgccaaacttcggcacaaacacccagggtgcagtagctcagcctggatacggctccgtgcgggcatctaatcagaatgaaggctgcacaaatcctcccccgtctggttcaggtggcggatcaagcaattcaggaggcggatcaggctcccagtcgggtagtagtgggtcgggcagtaatggggataataataacggctctagctccgggggttctagttccggatcaagctcaggaggtagttcaggaggttcatccggggggtctagcggtaatagcggcggctccaggggcgattctggaagcgagtccagttgggggtctagcaccggatcatctagtggcaatcatggaggctctggtggggggaatggacacaaacctggatgcgaaaagccaggaaatgaagcaaggggttctggagaaagtggaatacagggttttagagggcagggagtgtcgtccaatatgagggaaatttccaaggagggtaatcgtctgctgggcggcagtggcgataactacagaggacagggttcctcttgggggagtggaggaggagatgcagtgggcggcgtcaacaccgtgaattcagagaccagccccgggatgtttaattttgacaccttctggaaaaactttaagtcaaaacttggatttatcaattgggatgctattaacaaagatcagcgatcatctagaattccttag

SEQ ID NO: 14686 - RNA, 240 nt, synthetic construct; identical to SEQ ID NO: 13047
  misc_feature 1..240: note = source = /note="Description of Artificial Sequence: Synthetic coding sequence"
  source 1..240: mol_type = other RNA

SEQ ID NO: 14687 - RNA, 2130 nt, synthetic construct
  misc_feature 1..2130: note = source = /note="Description of Artificial Sequence: Synthetic coding sequence"
  source 1..2130: mol_type = other RNA
atggggtgcctgtgggggctggctctgccattattctttttctgctgggaggtcggcgtatccggctctagcgcaggaccttccaccagacgagccgatacagctatgactacagacgacacagaagtccctgcaatgacactcgcacccggccatgccgctctagagacgcagacactttctgccgagacatcttctcgtgctagcaccccagccggtccgatccctgaagctgagacaagaggagcaaaaagaatttcgcctgcacgtgaaaccaggagctttacgaaaacttcccccaatttcatggtgctcattgccaccagcgtggaaacatcagccgctagcggctctcctgaaggcgccgggatgaccacagtccagacgattaccgggagtgatccccgagaggcaatattcgataccctttgcaccgacgacagctcagaggaggccaaaaccctaacgatggatattctgaccctggctcacacttctaccgaggctaaaggcctgtcttccgaaagctccgcatcgagcgatagtccacaccccgttattacaccttctagggccagcgaatcatctgctagttctgatggcccccatccagtcattaccccatcgcgcgcatcagaatctagtgcctcctcagacggtccacacccagtgattaccccctctagagcgagcgagagttcagccagttccgatggaccccacccagtgatcacccctagccgagccagcgaaagctccgccagttcagatggtccacatccagtaattacaccttcccgggcatccgaatcaagcgcgtcttccgacggcccccatccagttattactcctagtagagcgagcgagtccagcgcgtcgagcgacggccctcaccccgtgatcacaccaagccgagcttctgagtcaagcgcgtccagcgacggcccccaccctgtcattacaccatcccgtgcaagcgaatccagtgcatctagcgatggacctcaccctgtgattacaccgagtcgtgccagcgagagctctgcttcctctgatggcctgcatcccgttattactccttctcgcgcctcagagagctcagccagcagcgatggtccccatcctgtgattacaccttctagagccagcgaatctagtgcatcatccgatggcccacaccctgttattaccccgagctggtcacctgggtccgacgtgacattgttggccgaggcactggtgaccgttacaaacattgaagtcatcaattgttccattactgagatcgaaacgactacttccagcatacctggtgcgtcagacaccgacctgatacctaccgaaggagtaaaagcgagttccacatctgaccctcctgccctgccagattccacagaagccaagccacacatcacagaggtgaccgcttccgccgagaccttgtccaccgccggaaccacagagtctgccgcccccgatgctaccgttggcacaccgttaccaacaaactccgcaaccgagagagaagtcaccgcgcctggagctacaactctgagcggggcactggtcaccgtctcgcgcaaccctttagaagagacctctgctctttccgtagagacacccagttatgtcaaggtttccggagccgcccctgtgagcatcgaagcgggtagtgcagtcgggaaaaccacatcctttgccgggtcgtccgcttccagctacagtccaagtgaggccgcgctgaagaactttaccccatccgaaacacccaccatggatatcgccacaaagggcccctttcccacatcccgggaccctctgccatctgtgcccccaaccacaaccaactcgtctaggggtaccaactcaacactcgccaagatcaccacaagcgccaagaccactatgaaaccacctacagctactcccactacagccagaactagacccaccaccgatgttagtgcaggcgagaacgggggctttttacttctccgattgagtgtcgcctctcctgaggatctgaccgacccaagggtggctgaacgactgatgcagcaattacatagagaactccacgcccacgctccacacttccaggtgtctttattacgtgttcgcagaggctag

SEQ ID NO: 14688 - RNA, 2067 nt, synthetic construct
  misc_feature 1..2067: note = source = /note="Description of Artificial Sequence: Synthetic coding sequence"
  source 1..2067: mol_type = other RNA
atgttgccaactgaagtaccccagagccaccctggtccatccgccctcctgttgttgcagttgctgcttccccctaccagtgccttcttccccaacatttggtcactgcttgctgctccaggatcaatcactcatcaggatttgaccgaggaagccgccctcaacgtaacactgcaactctttctggaacagcccccccccggccggccacctttacggttagaggactttttaggacggactctcttagccgatgatctgttcgccgcgtacttcggtcccggatctagtcgtcgtttccgggctgccctaggtgaagtcagtcgcgccaacgcagcacaggactttcttcccactagccgtaacgaccctgatttgcattttgacgctgaacgcctcggacaggggcgcgcaagactcgtgggcgcacttcgagagacagtcgtggcagcacgagcactggatcacactctcgcccgccaacgcctgggagccgctctccatgcactgcaggacttctactctcacagcaactgggtagaactcggcgagcaacagccacaccctcacctgttatggcctagacaagaactccagaatctggcacaggtggctgaccctacctgctctgactgtgaggagttgtcatgtccccgaaattggctcggattcaccttgcttaccagtggctacttcggcacccatccaccaaagccacccggcaaatgctctcacggcggccactttgatcgatcttccagtcaaccccctaggggcggtatcaacaaagattctacttcaccggggttctctccacaccacatgctgcacctccaggccgccaaattagcactattagctagtatccaggctttctctctgctcagatctagattgggcgatcgcgatttctcccgactcctcgacatcacaccagcttctagtttatcattcgtgctagacaccacgggctccatgggtgaagaaattaacgcagctaagatccaggcaagacatttggtggagcagagacgcggctcgccaatggaaccagtgcactacgtacttgtaccttttcacgaccctggcttcggaccggtttttaccacttctgatcctgactccttttggcaacagctcaacgagatccacgcgctgggcggcggagatgagccagagatgtgtcttagtgctctgcagctggcattactgcacacaccacctctttcagacatattcgtcttcaccgatgcctctccaaaagacgccttcttgaccaaccaggtcgaatccctgacccaggaacgtagatgcagagtcacctttttggtaacggaagatacctcccgtgttcaggggagagccaggagggaaatactgagtccactaaggtttgagccctacaaagccgtcgcacttgcttccggcggtgaagtgatatttactaaagaccagcatatccgcgacgtcgcagcaatcgtgggagagtccatggcagccttagttacattgcctctcgacccacccgtagtcgttccaggccagcctttagttttttctgtggacgggctgctgcagaagataacagtgagaatacatggcgatatttcatctttctggatcaaaaatcctgcgggtgtcagccaaggacaagaggagggtggaggcccgttaggccacaccagaaggtttggacagttttggatggtgacgatggatgatcctccacagactgggacttgggaaattcaggtcactgccgaggacactcctggtgtgcgggttcaggcccagacatccctcgacttccttttccatttcgggatccccatggaggacggtcctcaccctggtttataccctctcactcagcctgtcgcaggtctgcagactcagttgttggttgaatcccagtcttggggcagcagcgcggcctttctacccagacacccatcccgcggcccaagaggatgcaggacacgtccaggagcactcggagctcgtggcacatctggagctcggtcgccccggtctctggctgtggctcacgccgccgtacatccctag

SEQ ID NO: 14689 - RNA, 1257 nt, synthetic construct
  misc_feature 1..1257: note = source = /note="Description of Artificial Sequence: Synthetic coding sequence"
  source 1..1257: mol_type = other RNA
aataaccttaatgtcgggtctgacactaccagtgaaacaagcttttctctaagcaaagaggcccctcgtgaacacctggaccaccaagccgctcaccaaccctttccgcgcccaagatttaggcaggagaccggacatccatcactccaacgagactttccccgctcctttttgctcgatcttccaaattttccagacctctccaaagctgacatcaacggccagaaccccaatattcaggttacaatcgaggtggtcgatgggccagacagcgaggctgataaagatcagcacccagagaataaaccatcgtggagcgtgccttccccagactggagagcatggtggcagcgatccttgtctctggctagggcgaacagtggagatcaagattacaaatatgattctacttctgacgattccaacttccttaaccctccccgcggctgggaccatactgcgccgggacatcgtaccttcgaaaccaaagaccaacctgagtatgactccacagatggcgaaggagactggtcgctttggagcgtctgcagtgtaacatgtgggaacggtaatcagaaacgcacacgatcctgtgggtatgcctgcaccgctactgagtctcgcacctgtgataggcccaattgcccaggaattgaggatactttccgaacagccgctaccgaagtaagtttactcgctggtagcgaagaattcaatgccaccaaactgtttgaagtcgatactgattcttgcgagagatggatgagctgcaaatccgagttcctgaagaagtatatgcacaaagttatgaatgacctccctagctgtccctgctcatatcctaccgaagtagcctattctacagccgacatattcgaccggatcaagagaaaagatttcagatggaaagacgccagcggcccaaaggaaaaactggagatctataagcctactgcccgttattgcatcagatcaatgctgtcacttgaaagtacaaccttggccgcccaacactgctgttatggggataatatgcagctgatcactagagggaaaggggccggaacaccaaatctgataagcaccgagttttcagcagagttgcactataaggtagatgtgttaccttggataatctgcaagggggattggtccaggtataacgaagcacgccccccaaacaatggccagaaatgcaccgagagcccatccgatgaagactatatcaagcagttccaagaagcacgtgaatattag

SEQ ID NO: 14690 - RNA, 693 nt, synthetic construct
  misc_feature 1..693: note = source = /note="Description of Artificial Sequence: Synthetic coding sequence"
  source 1..693: mol_type = other RNA
atgcgcctcgccggccctttgaggattgtggtgctggtcgtaagtgtgggagtcacatggattgtcgtctctattctgttaggagggcccggctctggcttcccaagaatacagcaattgttcacatcccccgagtctagcgtgaccgccgccccccgggcccggaaatataaatgcggcttaccacagccttgtcccgaagagcacctcgcttttagagttgtgagcggcgctgcaaacgtaatcggccccaagatctgccttgaagataaaatgctcatgagttcagtcaaggacaatgtcgggagagggttaaatattgccttggtcaacggagtgagcggcgagctgatcgaggccagggcattcgacatgtgggctggtgatgtgaatgacctattaaaatttattaggccattgcacgaaggtactttggttttcgtcgcttcgtatgacgaccccgcaactaaaatgaatgaggaaaccaggaaattgttctcggagttgggaagccgcaacgctaaagaacttgccttccgagacagttgggtattcgtcggagcaaagggcgtccagaataagtctccatttgagcagcacgtgaagaacagcaaacactctaacaagtatgaagggtggccagaagcactcgaaatggaaggatgtataccacgtagatcaaccgccagctag

SEQ ID NO: 14691 - RNA, 192 nt, synthetic construct; identical to SEQ ID NO: 13052
  misc_feature 1..192: note = source = /note="Description of Artificial Sequence: Synthetic coding sequence"
  source 1..192: mol_type = other RNA

SEQ ID NO: 14692 - RNA, 1014 nt, synthetic construct
  misc_feature 1..1014: note = source = /note="Description of Artificial Sequence: Synthetic coding sequence"
  source 1..1014: mol_type = other RNA
atgctgagcctcggcgctcattccgtaacgaagacccaaattcttcagggtctcggctttaacctcacccacacccccgagtccgcaattcaccaaggcttccaacatctagttcactctcttaccgtgccctctaaggatctaaccctaaaaatgggctcagccctatttgttaagaaagaactccagttgcaggctaacttcctggggaacgtgaagcgcctatacgaagcagaggtcttttctaccgacttttccaacccgtctatcgcccaggcccgaattaatagtcatgtgaagaaaaaaactcagggaaaagtggtcgatattattcagggcctggacctgctgaccgctatggtacttgttaatcatatcttctttaaggcaaagtgggagaaacctttccatcccgaatacacacgaaagaacttcccatttctggtgggcgaacaagttactgtgcacgtgccaatgatgcatcagaaagagcagttcgcctttggggttgatacagaattgaattgttttgtcttacaaatggattacaagggcgacgccgtggccttctttgtcctcccttcgaaaggaaaaatgcgccagctggagcaggccctgagcgcccgtacactgcgaaaatggtcccattcattacaaaaacgctggattgaagtattcattccacgattcagtatttcagcttcttacaaccttgagacaattcttccaaaaatggggatccagaacgttttcgacaaaaatgcagatttctccgggatcgcaaaacgggactccctgcaggtttcaaaggctactcataaagcagtgctcgatgtgagtgaggaagggaccgaggcaaccgccgctacgactactaagtttattgttagaagcaaggacggtccttcatatttcacagtttcctttaatagaactttcctcatgatgattacaaataaagccaccgacgggatattgtttctgggcaaggtcgaaaatccaaccaagagctag

SEQ ID NO: 14693 - RNA, 336 nt, synthetic construct
  misc_feature 1..336: note = source = /note="Description of Artificial Sequence: Synthetic coding sequence"
  source 1..336: mol_type = other RNA
atgttttttaccatttctcgaaagaacatgtcccagaagttgtctctgctgcttttagtgtttggcctgatctggggtctaatgctactccactatactttccaacaaccaagacatcagagctcagttaagctcagggagcagattttggatttatctaagaggtacgtcaaagcactcgctgaggagaacaaaaacacagtcgatgtcgaaaatggcgcctcgatggcaggctacgccgatctaaagcggacaatcgctgttcttctcgatgacattctccaaagactggttaaactggaaaataaggtagattatattgtggtaaacggatag

SEQ ID NO: 14694 - RNA, 498 nt, synthetic construct
  misc_feature 1..498: note = source = /note="Description of Artificial Sequence: Synthetic coding sequence"
  source 1..498: mol_type = other RNA
atggaaatgtttcaaggcctgttactgctgctgttactatcgatgggtggtacttgggcatcaaaagagcccctgcgccctagatgccgtccaattaacgctactctggccgtcgaaaaagagggctgtcctgtatgtatcaccgtgaataccacaatctgcgccggatactgtcccaccatgacgcgagtcctgcagggcgttttacctgctttaccacaagtggtgtgcaactatcgagatgtacggtttgaaagcataagactccccggatgcccaagaggcgttaatcctgttgtatcttatgcagtggctttaagttgccagtgtgctctttgtcgccgatccacaactgactgcggcggaccaaaagatcatcctctcacctgcgatgacccacggttccaggacagttcctcatctaaagcccctcccccaagtttaccctcgccaagccgactcccaggcccatccgacacgccgatccttccccagtag

SEQ ID NO: 14695 - RNA, 699 nt, synthetic construct
  misc_feature 1..699: note = source = /note="Description of Artificial Sequence: Synthetic coding sequence"
  source 1..699: mol_type = other RNA
atggtgctcctgcttgtaattctcatacctgtgctggtatcttctgctggcactagcgcccactacgaaatgttgggcacatgcagaatggtttgcgacccatatggcggcaccaaggcaccttctacagccgcgacccctgatcgaggtctgatgcaatccctcccaacatttattcagggacctccgatgggcccacctggagaaaagggcgagccaggaaggcagggactcccaggcccccccggtgcaccgggccttaacgccgccggcgccatctccgccgccacatacagtacagtccctaagatcgctttttacgctggactgaaacggcagcatgagggatatgaagtgctcaaattcgacgatgttgtcaccaaccttggcaaccactacgatcccacaaccggaaagttcacatgtagtatacccgggatatatttttttacataccacgttttaatgagaggaggtgatggtacgagtatgtgggctgatctgtgtaaaaataatcaagttagagcgagcgccatagcacaggacgcggaccaaaactacgattatgcgagcaacagcgtagtcttgcacctggagcccggcgacgaggtttatatcaaattagatggcggcaaagcccacggcggcaacaataacaaatacagcactttttccggcttcattatctacgcagattag

SEQ ID NO: 14696 - RNA, 501 nt, synthetic construct
  misc_feature 1..501: note = source = /note="Description of Artificial Sequence: Synthetic coding sequence"
  source 1..501: mol_type = other RNA
atgggccctgaggcactttctagccttctgttgttgctcctcgtcgccagcggcgatgctgacatgaaaggacatttcgaccctgctaaatgtcgatatgcgctcggaatgcaggacaggactattcccgacagcgacatcagtgcctcgtccagttggagtgattccaccgctgccagacactccagactcgagagtagcgacggcgatggggcctggtgtcctgctggctccgtgtttcctaaagaagaagagtatctgcaagtagacctgcaacggctgcacctggtggctcttgttgggactcaagggagacacgctggtgggttaggcaaggaatttagcaggtcctacaggctaaggtatagcagggacggtcggagatggatgggatggaaggacaggtggggccaagaagtcatcagtggtaatgaagatcccgaaggcgttgtgttgaaggatctgggaccccctatggtggctagattggtgaggttctag

SEQ ID NO: 14697 - RNA, 627 nt, synthetic construct
  misc_feature 1..627: note = source = /note="Description of Artificial Sequence: Synthetic coding sequence"
  source 1..627: mol_type = other RNA
atgataattaaacactttttcggaacagtgctggttctcctcgcatccaccaccatcttcagcctcgacctgaagctcatcatctttcaacaacgccaggtaaaccaagaatcccttaagttgttaaataagctgcaaactctgtctattcagcaatgtttgcctcatcgcaaaaacttcctgttgccacagaagtcactctcgcctcaacagtaccagaaaggacacacacttgccatcctccacgaaatgctccagcagattttttcgctattccgggcaaatatatctctagacggttgggaggagaatcatacagaaaagttcctgatacaactccatcagcaactggaatacttggaagccctgatgggcctggaagccgagaagctgagtggtacgcttggatcagacaaccttcgcctgcaagtgaaaatgtatttcagacggatacatgactatctcgagaatcaggattactccacatgcgcatgggctattgtacaagtagagatttctagatgtctattcttcgtgttcagcttgactgaaaaactttctaaacaaggcagaccgttaaacgatatgaagcaggagctaacaactgagtttcgatcaccccgctag

SEQ ID NO: 14698 - RNA, 2241 nt, synthetic construct
  misc_feature 1..2241: note = source = /note="Description of Artificial Sequence: Synthetic coding sequence"
  source 1..2241: mol_type = other RNA
atgcccttcagacacaagcctgggagtgtcttcagcgttgagggggagaacttggatctcgcaatgtcaaaggaggaggtcgttgcaatgatcggcgatgggccatgtgtggtaaagaccctgacccggcaccacctgtactgtgagcccccagttgaacaacccctcccgaggcatcatgcattacgagaggcacccgactccttacccgagtttacagtgcagatgggtaacctgcgtttcagtctaggacatgtgcaatacgacggggagtcccccggagctttcccggtggccgctcaagtcgggctgggcgtgggcacatctttactggccctcggggtaatcatcatcgtgctgatgtacagacggaaatcaaagcaggccttgcgagactataagaaggtccagatacaactggagaatctcgagtcgagtgtgcgcgacaggtgtaagaaggagtttacagaccttatgaccgaaatgaccgacctcacgtctgatctgctaggttctggtatcccctttctggattacaaagtatatgctgaaaggatctttttcccagggcatagagaatctcctctccatagggatttgggcgtacccgagtcgcgcagacctaccgtcgaacaggggctgggccagctctcaaacctgctaaactcgaagctctttctgacaaaattcattcatacactggagagccaacggacattcagcgccagagatcgagcttacgtggcctctctgctgactgtggcattgcatggcaaactcgaatatttcactgacatcttacgaaccctgctctccgatttagtggctcagtatgttgccaaaaaccccaaactcatgctgcgaagaactgagacagttgtggagaagctgcttactaattggatgtccatttgcctgtataccttcgtgcgagactccgtgggggagcccctttatatgctgttccgaggcattaaacaccaggtggataaaggacccgttgacagcgtgaccggaaaagcaaaatatacacttaatgataaccgactgttgcgagaggatgtggaatatagaccactcactctgaatgctctgttagctgtgggtcccggggccggagaagcccagggcgtgccagtgaaggtcttagattgcgatacaatttcccaggccaaggagaagatgctggatcaactttacaaaggagtcccactgacgcaacgccctgacccccggacccttgacgttgaatggagaagcggtgtcgcagggcacttgatcctgtctgacgaggatgtaactagcgaagtgcaggggctgtggcggcgactaaataccttacaacattacaaagtcccagatggcgcaaccgtggccttggtgccgtgtctaaccaagcacgttctaagggaaaatcaggattacgttcctggagagcggactcccatgttagaagacgtggacgagggtggtattaggccctggcatttagtgaaaccatctgacgaacccgagccacctagaccccgccggggcagtttacgcggaggggaaagagaacgcgccaaggcgattcccgagatctatctcaccaggttattgtccatgaagggcactttgcagaagttcgtagatgacctattccaagtcatcctgtctacatctagacccgttccactggctgttaagtactttttcgatcttctggacgagcaggcccagcaacacggaatttctgatcaagacacaattcacatatggaagaccaactcactgccattgagattctggattaatattatcaaaaatccacagttcgtgttcgacgtgcagacctctgataatatggacgccgttttactcgttatcgcacaaacttttatggacgcatgtaccctggcagatcacaaactcggacgagactcacccatcaataagctcctatatgctagggacattcctcgctacaagagaatggtggagagatactatgcagatattcgccaaacagttcctgccagtgatcaggaaatgaattcagtgttggccgaactcagctggaactattccggggatcttggcgcgcgagtggcccttcatgagctgtataaatacattaacaaatactatgaccagataatcacagccctggaggaagacggaacggcacagaaaatgcagttaggctatcggttacaacaaatcgccgctgctgtggagaacaaggtgacagacttatag

SEQ ID NO: 14699 - RNA, 603 nt, synthetic construct
  misc_feature 1..603: note = source = /note="Description of Artificial Sequence: Synthetic coding sequence"
  source 1..603: mol_type = other RNA
atggcttggggcggcgttcatacctgttgcttccacctgtgttgctgctgctcgtggcctcagggggccgttccagaagagctgcacaaacaccctgggcaaacacttctgcttcaatgtcaatacagcccaaagagaggaccttatcaaccgaaatcatggtgccaacagacatcaccttctcgctgtactctcctggtgaccagttccaagccctggaccgctgtgcagaaatctcactacacaatctgggataagcccaacgccggattctttaacatcactatgatacaactgactcagaacgattcaggtttttattggtgcggcatttacaacgcttctgagaatatcataacagtgcttcgcaacatctccctcgtggttagtcctgctcccacgacctctcccatgtggaccctgccttggcttccaacatccacagtgctgattactagcccagagggcacaagtggacatcctagtatcaatggcagtgagacaagaaaaagtcgcgctcccgcctgtctgggcagcggtggccccaggttcctcgtcctggtgctttgtggcttgcttctcgccaaaggtctaatgctatag

SEQ ID NO: 14700 - RNA, 114 nt, synthetic construct; identical to SEQ ID NO: 13061
  misc_feature 1..114: note = source = /note="Description of Artificial Sequence: Synthetic coding sequence"
  source 1..114: mol_type = other RNA

SEQ ID NO: 14701 - RNA, 525 nt, synthetic construct
  misc_feature 1..525: note = source = /note="Description of Artificial Sequence: Synthetic coding sequence"
  source 1..525: mol_type = other RNA
atgagactcctcgcgtttctgtctctccttgccctggtgctccaggaaaccgggactgcgagccttccgagaaaagaacgaaagagaagagaagaacagatgccaagagagggagactcgtttgaagtgctgcctttacggaatgacgtcctgaaccctgacaattatggtgaagtaattgacctttccaattatgaggagctcacagactatggcgaccaattgcccgaggtgaaggtaacctccctggcaccggccaccagcatctcgcctgctaaatcgaccacagctcctggaactccctcaagcaaccctaccatgacccgccccacgactgcaggcctgttactgagctctcaacctaaccacgaggatattccgccactgccaaggcgcaccgcatacctgtacgccagatttaacagaatttctaggatccgcgccgaagattttaaaggccttacaaagctgaaaagaattgacttgtccaacaacctcatctcctcaattgataacgacgcctag

SEQ ID NO: 14702 - RNA, 657 nt, synthetic construct
  misc_feature 1..657: note = source = /note="Description of Artificial Sequence: Synthetic coding sequence"
  source 1..657: mol_type = other RNA
atggggcgcgtgtttttaaccggcgaaaaagcaaacagtatcctgaagcggtatccacgagccaacggttttttcgaagagattcggcagggcaacattgagagagagtgcaaggaggagttttgtacattcgaagaggctagggaggctttcgagaacaacgagaaaactaaggaattctggtcaacgtatactaaagctcaacagggcgaatccaatagaggtagcgactggtttcagttttatttaacatttccactcatttttggactcttcattatcctgttagtgattttcctgatatggcgctgctttttacgcaataaaacacggcggcaaacagtgacggaaggtcacattccttttccccagcatctcaacatcatcactccccccccaccgcccgatgaggtttttgatagctctgggttgtctcccggattcctgggctatgtggttggtcgatccgattcagtcagtacacgactaagcaattgcgacccccccccaacttatgaggaggctacaggccaggtgaacctccagcgcagtgaaacagaaccccacttagatccccctccagagtatgaagacatagttaactctaactcagcatccgctatacccatggttcctgtcgtgacaacaattaagtag

SEQ ID NO: 14703 - RNA, 2535 nt, synthetic construct
  misc_feature 1..2535: note = source = /note="Description of Artificial Sequence: Synthetic coding sequence"
  source 1..2535: mol_type = other RNA
atgggacccggcgccccattcgcacgcgttggatggcccctcccacttctggtggtcatggctgctggagtggctcccgtttgggcctctcactccccccacctacctcgcccacattctagggtccccccccatccttcgagcgaaagaagggctgtctacataggcgctctgttcccaatgtctggcggctggcctggcgggcaggcttgccaacctgcagtcgaaatggctctcgaggatgtcaactcccggcgcgatatcctcccagattatgaacttaaactgatacatcatgattctaagtgtgaccccggccaagccactaagtatctttatgaactactttacaatgaccctatcaagatcatcctgatgcccggatgtagttccgtcagcacacttgtcgccgaagctgcacgcatgtggaaccttatagtactcagctacggttcctcttcccctgccctctccaatcgacaacggtttccaactttctttcgaactcacccctccgccaccctgcacaacccaaccagagtcaagttgttcgaaaagtggggttggaagaaaatagccaccattcagcaaactaccgaagtattcacaagcaccttagatgatctggaggaacgggtgaaggaggccggaatagagatcacattcagacaaagcttttttagcgacccggccgtgcccgtgaaaaacctgaaaagacaagacgccagaattatagttggacttttctatgagactgaggctcgcaaagtcttctgtgaagtgtataaagagagactcttcggcaaaaagtacgtgtggttcctgataggctggtatgccgataactggttcaaaatctacgatccctccatcaactgcaccgtcgacgaaatgaccgaggctgtcgagggacacattaccactgagatagtgatgctgaaccccgccaacactcgaagcattagtaatatgacatcacaggagtttgtggaaaaactaactaaacgactaaagagacaccccgaagagacaggcggctttcaagaagcccccctggcatatgacgctatctgggctctggcattggccttgaacaagacctccgggggcggtggccggagcggcgtgcggctagaagactttaactacaacaatcaaaccatcaccgaccagatttacagagcaatgaactcatcaagcttcgagggagtgagcggtcatgttgtttttgacgctagtggttcccggatggcctggaccttgattgaacagctccagggcggatcatacaaaaagatcgggtattacgattccactaaagacgacctcagttggtccaagacggacaaatggatcggaggatccccacccgcggatcagacacttgttataaaaaccttcagatttctctcccaaaagctcttcatcagcgtgagtgtgctgtcatccctcggcattgtcctcgccgtcgtttgcctgtcttttaatatttataactcccatgttcgctacatccaaaattcacaaccaaatcttaataatctaactgcagtcggctgctccctggctctcgctgctgtgtttccactgggactggatggttaccacattggacggaatcagttcccattcgtgtgtcaggctcgcctatggttactggggctcggctttagcctgggctacgggtctatgttcacaaaaatctggtgggttcatacagttttcactaaaaaggaggagaaaaaagaatggcgtaaaacactagaaccctggaaactctacgctacggtcggcctactcgtgggcatggacgttctgacactggctatatggcagattgtcgaccccctccaccgcacaattgaaacatttgccaaagaggaaccaaaagaggatatagacgtctccattcttccccagttagaacactgctctagtagaaaaatgaatacatggctaggtattttctacggatacaagggacttttactgctcttaggtattttcctggcctatgaaactaaatctgtttcaacggagaagataaatgatcatcgcgcagtgggcatggcgatctacaacgtggctgtcttgtgcctgataacagcccccgttacaatgatcctcagcagccaacaagacgccgcattcgcattcgcttccctggccattgttttctcttcctatattacactcgtggtgttgtttgtccccaagatgcggcgcttaattacccgcggcgagtggcagagtgaggctcaggacaccatgaagacaggctcgagtactaacaacaacgaggaagagaagtcgcgattactcgaaaaagaaaacagagaactggagaaaattattgccgaaaaggaggaaagagtttccgaactgagacaccagttgcagagcagacagcagttgagaagtagacggcaccccccaactcctccagaacctagtggagggctgcctagaggcccacccgaaccacccgatagattgtcttgcgatggaagtcgtgtgcatcttttgtacaagtag

SEQ ID NO: 14704 - RNA, 2007 nt, synthetic construct
  misc_feature 1..2007: note = source = /note="Description of Artificial Sequence: Synthetic coding sequence"
  source 1..2007: mol_type = other RNA
atggatctcgtattgaaacgctgcttgctgcacttggccgtaattggtgccttacttgcagtcggagctactaaagtaccgcggaatcaggattggcttggggtttctagacagctccgaacaaaggcctggaatcggcagttgtacccagaatggaccgaggcacaacgccttgactgttggcgcggcggacaggtgtcgctgaaggtctctaatgacggaccgacactcattggggcgaacgcttcgttttctatcgctctcaatttcccgggcagccagaaagttctgcctgacggccaagtaatttgggtaaacaataccatcattaacggatctcaggtttggggcggacaacctgtttatccccaggaaacagatgacgcttgcatctttcctgatgggggcccttgtccaagcgggtcctggtctcagaagcgttccttcgtctacgtgtggaagacttggggacagtattggcaggttttgggaggtccagtcagtgggctgtcaatcggaactggaagagcaatgctgggaacccatactatggaagtcaccgtgtatcacagacgtgggagtcgctcttacgtgcctctggctcactcgtcctccgccttcaccattacggaccaagtgcccttcagcgtaagcgtctcccagctccgtgctctcgatgggggaaataaacacttcctcaggaaccagccacttacctttgcccttcagctgcatgatccctctggctatttagccgaagccgacctgtcttacacgtgggactttggtgactctagcggtactctcatttcaagagctctggtagtgactcatacatatctggaaccagggcctgtcactgcccaagtggtgctgcaggccgccatccccctgacatcctgcggcagcagtccagttcctggaacaaccgatggccatcgacctaccgcagaggccccaaatactactgccgggcaggtgccaacaacagaggtcgtcggaacaactcccggccaagccccaacagctgagccctctggtaccacctccgtgcaagttccaactacagaggtgatctctacagctcccgttcaaatgccaaccgcggaatctaccgggatgactccagaaaaggtccccgtgtctgaggtgatgggcaccactctggcagaaatgtctacccccgaagccactggcatgaccccagccgaggtgtctatcgtggtgctgtccggaacgactgcagcccaagtgaccacgacagagtgggtggagactacagctcgcgagttacctattccagaaccagaaggccctgacgcgtcctctattatgagtacagagagcatcactgggtccttgggacctctgttagacggcactgctacattaagattggtcaaacgtcaggtgcccctcgactgtgtcctgtatcgatatggttccttctcagtaaccctggatatagtgcaaggaatcgagtccgctgaaatcctccaggcggtcccttctggcgaaggcgatgccttcgagctcactgttagctgtcaaggcggcctccctaaagaggcttgtatggagataagctctccaggatgtcagcctcccgcccagagactgtgccaacctgtcctccccagccccgcctgtcagctcgttttgcaccaaattctcaaagggggcagtgggacttattgtttgaatgtgagccttgccgataccaacagtttggccgttgtgtccacccaattgattatgcccgtacccggaatcctcctcaccggacaggaagctggtttgggacaagtgcctcttattgtaggtatcctactcgtgctcatggccgtagtgctcgcctcattaatttatcgcagaagactaatgaaacaggacttttccgtgccgcagttgccccactcaagctcccattggctacgcttacctcgaattttctgcagttgtcctatcggcgagaactccccgcttttatcgggacagcaggtctag

SEQ ID NO: 14705 - RNA, 525 nt, synthetic construct
  misc_feature 1..525: note = source = /note="Description of Artificial Sequence: Synthetic coding sequence"
  source 1..525: mol_type = other RNA
atggcagatatgcaaaatttggttgagaggctggaacgcgccgtgggcagactggaagccgtatctcacacatcagacatgcaccgaggctatgcagattccccctccaaagcaggcgccgccccatacgtgcaggctttcgattcactattggccggtccagtcgcagaatatttaaagataagcaaagagatcggtggcgacgtgcagaagcacgcagagatggttcatacgggtctgaaacttgagagagccctgctcgtgacagcttcccagtgtcagcagcccgcggagaacaagttgagcgacctcctcgccccaatttctgaacagattaaggaggtgattacattcagagaaaaaaaccgtggatctaagctgtttaatcacttgagcgctgtgagcgaatctatacaggcattaggctgggttgctatggctccgaagcccggcccttacgtaaaggaaatgaatgatgcagcaatgttttacaccaacagagttcttaaagaatataaggactag

SEQ ID NO: 14706 - RNA, 1368 nt, synthetic construct
  misc_feature 1..1368: note = source = /note="Description of Artificial Sequence: Synthetic coding sequence"
  source 1..1368: mol_type = other RNA
atgttacaccccgaaacctcccctggacgtggtcacctactggcggtcctactcgccctgctaggcacagcatgggccgaagtgtggcccccacagctccaggagcaagctccaatggccggcgcgttaaaccgaaaagagtcttttttattgctgtccctgcataaccggcttaggtcttgggtccaacctcccgcagcagacatgaggaggcttgactggtcggattctctagcccagcttgctcaagctcgtgcagccctgtgcgggacacccacaccttccctcgcttcgggcctctggcgcaccctccaggttggctggaatatgcagttgctacccgccgggttggtgtcttttgtcgaagtcgttagcctctggttcgcggaaggacagcgctactctcatgcagcaggagaatgcgcccggaacgcaacgtgcacccactacactcagctggtttgggccacatcttcacagctggggtgcggacggcacctgtgctcagcaggccaggcagccattgaggccttcgtatgtgcttactccccacgcggtaactgggaagtgaatggaaagacaatagtcccctacaaaaaaggtgcctggtgcagtctgtgcacagcaagcgttagcggatgcttcaaagcctgggatcatgccggcggcctgtgtgaggtgccacgaaatccttgtagaatgtcctgccagaaccacggaaggctaaatatctccacttgtcattgccattgtcctcctggatacaccggccgttattgtcaagttcgttgctcactccagtgtgtccacggtcgttttcgggaggaagaatgcagttgtgtgtgcgatatcgggtatggaggtgcacagtgtgcaaccaaagtccactttccattccatacgtgcgatttacgaatagatggggactgtttcatggtgtcctcggaggcagatacctattacagagctagaatgaagtgccagaggaaagggggcgtgttagcccagattaaatctcagaaggtccaggatatcttagctttttacctcggcagactagaaaccacaaatgaagtgatcgactctgatttcgaaactaggaatttctggatcggactaacttataaaactgccaaagactctttccgatgggccacgggagaacaccaggcctttacaagcttcgcattcggacagccggacaatcatggtctggtgtggttgtcagctgctatgggttttggaaattgcgttgaactacaggcctctgccgcctttaattggaatgatcagagatgtaaaactaggaacagatacatatgccaatttgcccaggagcacatatctagatggggcccagggtcatag

SEQ ID NO: 14707 - RNA, 297 nt, synthetic construct; identical to SEQ ID NO: 13068
  misc_feature 1..297: note = source = /note="Description of Artificial Sequence: Synthetic coding sequence"
  source 1..297: mol_type = other RNA

SEQ ID NO: 14708 - RNA, 2742 nt, synthetic construct
  misc_feature 1..2742: note = source = /note="Description of Artificial Sequence: Synthetic coding sequence"
  source 1..2742: mol_type = other RNA
atgggtccagaagccttgtcgtcacttctgctcctgcttttagtggcgtccggagatgccgatatgaaaggacactttgatcctgccaagtgcagatatgccctgggaatgcaagacaggacaattcccgattccgacatctctgcctcctccagttggtcagatagcactgccgcaagacacagccggctcgagagttcggatggcgacggcgcttggtgtcccgccggttcagtctttcctaaggaagaagaatacctgcaagttgacctgcagcgcctgcatttggttgcactggtgggaacgcaaggacggcatgcagggggactcggaaaggagttttcacggtcatatagactacggtattcaagggatggccgccggtggatggggtggaaagaccggtggggccaagaagtaatctccggtaatgaggatcctgagggggtcgtcctgaaggatctcgggccacccatggtcgccaggctcgtcaggttctacccacgcgcagacagagtgatgagcgtatgccttagagtagagctgtacggatgtttatggcgcgacggactcctgagctataccgccccagtggggcagacaatgtacctgagcgaagccgtgtatctgaacgatagcacatatgatggacatactgtgggcggactacaatacgggggcctagggcaactggcagacggagtggtgggattagacgactttagaaaaagccaagaactaagagtctggcctggatatgactacgttgggtggtcaaatcatagcttcagcagcggctatgtcgaaatggagttcgaatttgacaggctacgcgcgtttcaagctatgcaagtacattgcaataacatgcacaccttgggcgcacggctacctgggggagtagaatgtcggtttcgccggggtcctgctatggcttgggagggagagccaatgcgacataacctgggcgggaatttaggggacccaagagcaagagccgtaagcgtaccccttggaggccgggttgctcgcttcctgcaatgccgcttccttttcgccggaccgtggcttctgttttccgaaatcagttttatctccgatgtagtgaataactctagtcctgcccttggtggtaccttcccgcccgccccctggtggccacccggtcctccccctacaaacttttctagcttagaattagagcccaggggacagcagccagtagccaaggcggagggatcccccactgcaatactcataggatgcttggtggcaataatcttgttgctgttactgattatcgccctcatgttatggaggctccactggcgaaggcttttatctaaggctgaacgtagagtactggaagaagaacttaccgtccacctttccgttcccggggatacaatcttgattaacaaccggccaggacccagagagccccccccctaccaggaaccaagaccacgaggtaaccccccacattcagccccatgcgttcccaatggatcagccttgctcctgtctaatcccgcctacaggctcctgcttgcaacatatgcccgaccaccacgcggcccaggacctcctacccccgcgtgggcgaagccaactaatacgcaggcctatagcggggattacatggaacccgaaaagccaggtgcaccacttctgcctcccccccctcagaactccgtgcctcattatgctgaagcagacattgttactctccaaggcgttacaggtggcaacacgtacgcagtgcccgctctgccaccaggcgcagtaggagacggaccaccaagggtagattttccccgatccaggttaaggtttaaggagaagctgggtgaaggccaatttggcgaagttcatttgtgtgaggtggacagcccccaggaccttgttagtctagacttcccactgaatgtgcgcaaagggcatccactccttgtagccgttaagatacttcgcccagacgctacgaagaacgcccggaacgactttctgaaggaggtgaagattatgagtcgactgaaggacccaaatatcattcgtttgcttggcgtttgcgtgcaggatgatcccctctgtatgataactgattacatggagaacggagaccttaaccagttcttatccgctcaccagctggaagacaaagctgctgagggtgcaccgggggacggacaggcggcacaaggccctactatttcttatccgatgttacttcatgtggcggcccagatcgcctccggtatgcgatacctggccactctgaatttcgtccaccgggacttagctacaaggaattgcctcgtgggagaaaatttcactataaaaatcgctgactttggcatgtccaggaacttatacgcaggagattactatcgtgttcaaggaagagcagttctgccgattagatggatggcctgggaatgtattctcatggggaaattcaccaccgcctctgacgtctgggcattcggagtgactctttgggaagtactaatgttgtgtagagcccagccattcggccagctgaccgatgaacaagtcatagagaatgctggagagttcttccgagaccaggggcgccaggtatatctcagtcgtcccccagcctgtccccagggtctttacgaacttatgctgcggtgttggagccgcgagagcgaacagagacctccgttttcccagctccaccgtttcctcgctgaagacgcactgaacactgtctag

SEQ ID NO: 14709 - RNA, 678 nt, synthetic construct
  misc_feature 1..678: note = source = /note="Description of Artificial Sequence: Synthetic coding sequence"
  source 1..678: mol_type = other RNA
taagctgatttgccttcctgttggggagcggggccctgctacactggacacaaagtcggagccctgagacgtgacactgtgatatgttgttgcaggcacggagattactccacgccctgtctgttcacccctggcaaaccctccagaaacccttcaccgtggaaaagaactctctggactttaagtgccccttgggccgggcctgctggctggaccggcgaagagcagaatgcgaccaagaccggattgattactcggcgtccgaggcctttacgacggagacctcatcctgcgcccgcaagcccactacctgagattatcagaggtaatatccccagaatgctgggcaaattcgttcctgtcaactgggaacctcctcagccattgccattccccaagtacctgcggtgttaccggtgcctcctcgagacaaaggaattaggttgtctgttgggatctgacatatgcctcacacctgccggctcttcctgtatcacccttcataaaaaaaactctagcggatcagacgtgatggtatcagactgccgctccaaagaacagatgtcagattgtagcaatacacgcacctcaccagtctctggtttttggatattctctcagtattgttttctggacttctgtaacgaccctcaaaatcgcggcttatatacaccatag

SEQ ID NO: 14710 - RNA, 405 nt, synthetic construct
  misc_feature 1..405: note = source = /note="Description of Artificial Sequence: Synthetic coding sequence"
  source 1..405: mol_type = other RNA
atgccacggtgcagatggttatctcttatcctcctgacaataccactggctctggtagcccgaaaagaccctaaaaagaatgagaccggcgttcttcgcaagctgaagccagttaatgcctcaaatgccaatgtgaagcagtgtttgtggttcgccatgcaggaatacaacaaggaaagtgaagacaagtatgtcttcctcgtcgtgaagaccttacaggcacagctgcaagttacaaatctcctggagtacttgatagacgttgaaatcgcccgctcagattgcagaaaacctctttctacgaacgaaatatgcgccatccaagagaactccaagctgaagagaaagttgtcatgtagcttcctggtcggagcattgccgtggaatggagaattcaccgtctag

SEQ ID NO: 14711 - RNA, 1182 nt, synthetic construct
  misc_feature 1..1182: note = source = /note="Description of Artificial Sequence: Synthetic coding sequence"
  source 1..1182: mol_type = other RNA
atgcgaaccctattcaacttgctctggcttgcgctggcatgcagccccgtacatacaaccctttccaaatcagatgcaaaaaaagcggccagcaaaactctcctggaaaagtctcaattctctgacaagccggtccaagatcgcggcctcgtggtcactgatctcaaggccgaatccgttgtcttggaacaccggagttactgtagtgctaaagcgcgcgataggcatttcgccggtgatgtccttggctatgtaactccatggaactctcacggatacgatgtaactaaagtcttcggaagcaaattcacccagatctcaccagtgtggctgcagctgaaaagacgagggcgagagatgtttgaggtcactggactccatgatgtggatcaaggatggatgagagctgtgcgtaaacacgccaagggcctccatatagttccgcggctgctgttcgaggattggacctacgacgatttccggaacgttctggattctgaagatgaaatagaagaactctcaaagactgtagtgcaggtggccaagaatcaacacttcgacgggttcgtggtggaggtatggaatcaactcctgtctcagaaaagggtgggtttaatccatatgcttactcatctggcagaggctttacaccaagctagactgctcgccttgcttgttattccacccgcaatcactcccggcactgatcagttgggcatgttcacccataaagagtttgaacaacttgcccccgttctggacggctttagcctgatgacctatgactattcaaccgctcaccagcccgggccgaacgctcccctgtcttgggtgagagcttgtgttcaggtgctggacccaaagtcaaaatggcgatcaaaaattctcctgggtctcaacttctatggaatggactatgctacatccaaagacgctcgggaaccagtcgtgggagcgcggtatattcaaacattaaaggatcatcggcctaggatggtatgggactctcaagcttccgaacacttctttgaatacaaaaaatcacgaagcgggaggcacgttgttttttaccctaccctgaagtccttgcaggtgaggctagagttggcccgtgagctcggagtgggcgtgtcaatctgggagctgggacagggacttgactatttctacgatcttctctag

SEQ ID NO: 14712 - RNA, 678 nt, synthetic construct
  misc_feature 1..678: note = source = /note="Description of Artificial Sequence: Synthetic coding sequence"
  source 1..678: mol_type = other RNA
taagccgatctgcccagctgttggggtgccggaccttgttacacaggccataaagtgggcgcattgaggagggacacggtgatatgttgctgccgtcacggtgactatagcacaccttgtttattcacgcctggaaagccctcaagaaatccgtctccctggaaacgaaccttgtggacgttgagtgctccctgggcgggacctgcaggatggaccggagaagagcagaacgcaaccaagaccggtctgatcacacggaggcccagacctctccgaagaagaccccatcccgctcctgctagtccccttccagaaattattagaggaaacattccccgcatgttaggaaagtttgtgccagttaattgggagccccctcagccactgccgttccctaagtatctcagatgctaccggtgtctcctggagaccaaggaactggggtgtttgctcggatctgatatatgcctgactccagccggctcgtcctgtatcaccctgcataagaaaaatagctcagggtccgacgtcatggttagcgactgtcgcagcaaggagcagatgagtgactgctctaatactcgaacaagtccagtgagtggcttttggattttctctcaatactgcttcctcgacttctgcaatgatccacaaaaccgcggactgtataccccatag

SEQ ID NO: 14713 - RNA, 1410 nt, synthetic construct
  misc_feature 1..1410: note = source = /note="Description of Artificial Sequence: Synthetic coding sequence"
  source 1..1410: mol_type = other RNA
atgatgagactcgggggtaggttggttctgaatactaaagaagagctcgccaacgaaaggctgatgaccctcaagatagcagagatgaaagaagcaatgcgtacactgattttcccaccatccatgcacttcttccaagcaaaacatttgatcgaacgttctcaggtattcaacatattgcgaatgatgcctaaaggtgccgccctccacctgcatgatatcggaattgtgactatggactggctagtcagaaacgtgacatataggccccattgtcatatctgctttaccccacgcggcattatgcaatttagattcgcccatccaacacctaggccaagcgaaaagtgcagcaaatggatcctccttgaagactatagaaagagagtgcaaaacgtgaccgaatttgatgactccctgctcagaaactttactctggtgacacagcacccagaggtcatctatacgaaccagaacgtcgtctggtccaagtttgagaccatttttttcaccattagcggcctcattcactacgcacccgtatttagagactacgtgttcaggtctatgcaggaattctacgaagacaatgttctatatatggagattcgggctaggctgcttcccgtttacgagctatcaggggaacatcacgatgaggaatggtctgtgaaaacctatcaagaggtcgcccagaagttcgtcgagacccacccagaatttatcggtattaagattatctactctgatcacagaagtaaagacgtggcagtgatcgctgagtccattaggatggctatgggattacggataaagtttccgaccgttgtcgctggatttgacctagttggacacgaagacacaggccactccctccatgattataaagaggcactgatgattccagctaaggatggtgtgaaactcccttatttcttccacgccggagaaaccgactggcaaggaacatcaatcgacaggaacatactagatgcccttatgctgaacactacccgcataggacacgggttcgccctcagcaaacaccctgcagtccgcacttactcttggaagaaggacatacccatcgaagtttgtccaatcagcaatcaagtgctcaaactggtcagcgatctaagaaaccatcccgtcgccaccctaatggcaactggacatccgatggttatttcctcagacgatcctgcgatgttcggcgcaaagggtctcagctacgatttttacgaagtgtttatgggcattggaggcatgaaggctgatctgaggactctgaaacaactcgcaatgaacagcatcaaatatagcaccttgttggagagtgaaaaaaacacatttatggaaatttggaaaaagagatgggataagtttattgccgatgtggccaccaagtag

SEQ ID NO: 14714 - RNA, 1137 nt, synthetic construct
  misc_feature 1..1137: note = source = /note="Description of Artificial Sequence: Synthetic coding sequence"
  source 1..1137: mol_type = other RNA
taatattctggggattacatggaaccggagaagccaggcgcacccctcctgcccccacccccacagaactctgtgccccactacgctgaagccgatatcgttacactacagggagtaacgggtggaaatacctatgccgtgccagccctgccccctggagctgttggcgatgggcccccgagagtggactttccaagaagtcgcctgcgctttaaggagaaactgggagagggacaatttggcgaggttcacctttgtgaggtagactccccacaggacttggtatcccttgatttccctcttaacgtacgaaagggtcacccactgctggttgctgttaaaatccttaggcctgatgctaccaaaaacgcttctttttctctcttctcacggaatgatttcctgaaagaggtgaaaataatgagccgtctgaaagatcccaatattataaggctgctaggggtgtgtgttcaggatgacccgctgtgtatgatcaccgattacatggagaatggcgaccttaatcagtttctcagcgctcaccagcttgaagacaaggcagcagagggcgctcctggagatgggcaggctgctcaaggaccaaccatttcctatcctatgttactccacgtggctgcccaaatcgcatcaggaatgagatacctcgcaacactaaacttcgttcacagagatttagcaacacgtaattgtctggttggggagaacttcacaattaagatcgcggatttcggtatgtctcggaacttatacgctggggattattaccgcgtacaggggcgtgcagttctacctattagatggatggcctgggagtgtatcctgatgggcaaatttactactgcaagtgacgtctgggcgtttggcgtgacgctctgggaggtcttaatgctgtgccgcgcacaaccattcggccaactcaccgatgagcaggtaatagagaatgcaggagaattctttagagatcagggtcggcaagtgtacctgtccaggcctcccgcgtgcccacaaggtttgtatgagcttatgttaagatgttggagtcgggagtccgaacagagacccccatttagccaactgcaccgattcttagccgaggacgccctcaatactgtgtag

SEQ ID NO: 14715 - RNA, 678 nt, synthetic construct
  misc_feature 1..678: note = source = /note="Description of Artificial Sequence: Synthetic coding sequence"
  source 1..678: mol_type = other RNA
tgagctgatcttccatcctgttggggggcaggaccatgttacacagggcacaaggtgggagctctcaggcgggacaccgtgatttgctgctgtcggcacggggattatagcacaccatgcctatttacacctggaaaaccaagcagaaacccctctccatggaagagaaccctgtggaccctgagtgccccctgggctgggcccgctggatggacaggagaagaacaaaacgccacgaaaaccggcctcataacccgaaggcccagacctttgagaaggagacctcatccagcaccagccagcccactgccagaaattatacgtggcaatattccaagaatgttaggaaaatttgttcccgtgaattgggaaccacctcaaccactccccttcccaaaatatctccgttgttatcgctgcctccttgagacaaaggaacttggttgtctcctcggatctgacatctgcctcacccctgcaggatccagttgtattactttgcacaaaaagaatagcagtgggagtgacgtgatggtgtccgattgtcgaagtaaggaacagatgagtgattgttctaatacgaggacctccccagtgtccggattctggattttctctcaatactgcttccttgacttttgtaatgacccacaaaaccggggcctgtataccccttag

SEQ ID NO: 14716 - RNA, 846 nt, synthetic construct
  misc_feature 1..846: note = source = /note="Description of Artificial Sequence: Synthetic coding sequence"
  source 1..846: mol_type = other RNA
atgcttccaaagtctagacgtgcactgacaatacaggaaatcgcagcgctcgctcgctcatcactccacggaatcagccaggttgtgaaggaccacgtcacaaagccgacagcaatggctcagggtcgcgtggcacatctcattgaatggaagggatggtccaaaccatcagattctccagcagctctcgaaagcgcttttagtagttatagcgatctgagcgagggcgaacaggaggcacgcttcgcagccggagttgcagaacaattcgcaatcgccgaggctaaactgcgcgcctggagctcagtcgatggtgaagattctacagatgactcttatgacgaagatttcgcaggggggatggataccgacatggcaggccaactccctctcgggccacaccttcaagacctgtttactggacatcgcttctctcgcccagtccggcaagggagcgtcgagcccgaatccgactgttctcaaactgtatcgcccgataccttgtgtagctctctatgctccctggaagatggtctgctgggatcccccgccagactggcctctcagctactcggagatgagctgttactcgccaaacttcctcctagccgtgaatcagcattccgcagtttaggtcccctggaggctcaagactcactttataactcacccctcaccgaaagttgtttgtcccccgcggaagaggagcccgcaccatgcaaagactgtcaaccactgtgtccccccctcaccggcagttgggagcgccagcgccaggcaagcgacctggcttcaagcggagtggtcagcctcgatgaggacgaggccgaaccagaagaacagtag

SEQ ID NO: 14717 - RNA, 1110 nt, synthetic construct
  misc_feature 1..1110: note = source = /note="Description of Artificial Sequence: Synthetic coding sequence"
  source 1..1110: mol_type = other RNA
atgaagtttcaggggccactggcatgtctgctgcttgctctgtgcctcggatctggggaagctggacctttacaatccggggaagaatctacgggaacaaatataggagaggcactgggccacggattaggcgacgcattaagcgagggtgtggggaaggctattggtaaggaggcggggggagctgcaggaagtaaggtgagcgaagccctgggtcaggggaccagggaagctgtcggaaccggcgtccgacaggtgcccggatttggagtggccgatgccctcggcaatcgtgtgggagaggctgcgcatgctctcggcaatacggggcatgaaataggtaggcaggcagaggatgtgattaggcatggggctgatgctgttcgggggtcctggcagggagtgcctggccacaacggcgcctgggagacttcaggaggtcatggtatttttggctcccaaggtggcctaggcgggcaaggacaggggaatccaggcggactcggtaccccatgggtgcacggctatccagggaatagcgccgggagctttggaatgaatccacagggtgctccctggggacaaggtggtaacggtggcccacccaacttcggtactaacactcagggagcggtggcccaacctggatacggttcagttagagcctcaaatcaaaatgagggctgtaccaatccccctccaagcggatctggcggcggatcgtctaattcagggggaggatctggctctcagtctggttcaagtggctccggttctaatggggacaataacaacggtagcagcagtggtgggtccagtagcgggagtagtagcggcggatctagcggtgggagcagtggtggctcttctggtaactcaggaggcagtcgtggtgattcgggcagtgaaagctcctggggatcaagtacaggaagtagcagtggcaaccacggtggctcaggaggggggaatggccataaacctgggaacagcgagacatcaccaggcatgtttaatttcgatacattttggaagaatttcaaatccaaactcggtttcattaactgggatgctattaacaaggaccagcgaagttccagaatcccttag

SEQ ID NO: 14718 - RNA, 420 nt, synthetic construct
  misc_feature 1..420: note = source = /note="Description of Artificial Sequence: Synthetic coding sequence"
  source 1..420: mol_type = other RNA
atgggcccagaagctctatcatcactgctgctgttactgcttgttgcaagtggcgacgcggacatgaaaggacacttcgaccctgccaaatgtaggtacgccttgggaatgcaagatagaaccatcccagatagtgacatatctgcttcatctagttggtcagatagtactgccgctcggcattcccggctagagtcatcagatggggatggcgcttggtgtcccgcaggaagtgtgttccctaaggaagaggagtaccttcaagttgatttgcaacgcctgcatctggtcgcgctggtcggaacgcaggggcgacacgctggggggctagggaaagagtttagccgctcatatcggctcaggtacagtagagacggacgaagatggatgggatggaaggatcggtggggacaggagtag

SEQ ID NO: 14719 - RNA, 516 nt, synthetic construct
  misc_feature 1..516: note = source = /note="Description of Artificial Sequence: Synthetic coding sequence"
  source 1..516: mol_type = other RNA
atgcggcacaaccttggaggtaacttgggcgatcccagagcccgcgctgtttctgtgccacttggtggaagagtcgccagattcttacaatgcagatttctgtttgcgggcccttggctcctcttttctgaaattagctttattagtgacgtggtgaataactcaagtccagctctgggcggcacttttcccccagctccttggtggccccccggccctccccccacgaatttttcctccctggaactcgaacctagagggcagcagccagtagccaaagccgaaggcagtcctactgccattttaattggctgtcttgttgccataattctacttcttctcctaatcattgccctcatgctgtggagactgcattggcgacggctgctatccaaggtcctcgaatcacacccacgtacccgtagtccgggtctcgttggtattaggcccactccgctcccagtctcgcccatggccctcgtgcatttgtgtgaagtcgattccccccaagattag

SEQ ID NO: 14720 - RNA, 192 nt, synthetic construct; identical to SEQ ID NO: 13081
  misc_feature 1..192: note = source = /note="Description of Artificial Sequence: Synthetic coding sequence"
  source 1..192: mol_type = other RNA

SEQ ID NO: 14721 - RNA, 1137 nt, synthetic construct
  misc_feature 1..1137: note = source = /note="Description of Artificial Sequence: Synthetic coding sequence"
  source 1..1137: mol_type = other RNA
tgatacagtggggattatatggaacccgagaaacccggcgcgccactacttccccccccaccacaaaattcggttccacactacgccgaagccgacatcgtgaccctacagggtgtgaccggagggaatacgtatgccgtgccagcactgcccccgggagctgtcggggatgggcctcctagagttgacttccctagaagcaggctccgttttaaagaaaaactcggcgaaggacagtttggcgaggtgcacttgtgcgaggtggactccccccaggacctagtgtcactcgatttcccattgaatgtgaggaaaggccacccattgctggtcgccgtgaagatactacgtccagacgcaactaaaaatgcttccttctcgcttttctcacggaacgatttcctaaaggaggtgaagatcatgagtagactaaaagatcctaacatcattcgcttactcggcgtgtgcgtgcaggacgatccactttgcatgattaccgactacatggagaacggagacttaaaccagtttctgtcagcccaccagctcgaagataaggctgcagagggggctccaggtgacggacaagcggcacaaggccctactatttcatatccaatgctgcttcacgtcgctgcacagattgctagtgggatgaggtatctggcaacactcaacttcgtgcatagagacctggcaactcgcaactgtctggtgggcgaaaactttaccattaagatcgcggacttcggtatgagcagaaatctttatgcgggcgactattatagggtccagggacgggccgtgcttccaatcagatggatggcctgggagtgtattctcatgggaaagtttacaaccgcttccgatgtatgggccttcggcgtgaccctctgggaagtgctgatgttgtgcagggcacagccttttggccaactgacagatgagcaagtgattgagaacgcaggcgaattctttcgcgatcaaggccgccaagtgtatctatcccggcccccagcctgtccacagggactctatgaattgatgctccgatgctggtcccgcgaatccgaacagcgccccccattcagccagctgcatcgatttctcgcagaagacgcgctgaacactgtgtag

SEQ ID NO: 14722 - RNA, 2535 nt, synthetic construct
  misc_feature 1..2535: note = source = /note="Description of Artificial Sequence: Synthetic coding sequence"
  source 1..2535: mol_type = other RNA
atggggcccggcgctccttttgcccgagtgggatggccacttcccctattagtcgtgatggctgctggagtcgcccccgtgtgggcctcccactcaccgcacttacctcgcccccactcccgagttcccccacacccttcctcggagaggcgcgcagtttacatcggcgctttgttccccatgtccgggggttggcccgggggccaagcctgccaaccggctgtcgaaatggcattggaagacgtcaattctcgtcgtgacatcctgcctgactatgaactaaaactcatccaccacgactccaaatgtgacccaggacaagccaccaagtatctctatgaattactgtacaatgatcccattaaaataatactaatgccaggatgcagctctgtctcgactcttgtggctgaagccgctagaatgtggaatctaatcgtcctgtcttatggatccagcagcccagccctatccaaccgacaaagattccctacatttttcagaacacatccctccgcaacactgcacaatcctacccgcgttaagcttttcgagaagtggggatggaaaaagatcgccaccatccagcaaactaccgaggtgttcactagtaccctggacgatctggaggagagggtgaaggaagccgggatcgaaattacttttagacagtcattcttcagcgaccccgctgtacccgttaagaatctcaagaggcaggacgctcgaattatagtaggtcttttctatgaaactgaagcgaggaaagttttttgcgaggtctataaagaacgtctcttcggaaagaaatatgtctggttcctgataggttggtatgccgataattggttcaagatctacgacccctctataaattgtaccgtcgatgagatgaccgaagccgtggaggggcacattacgaccgaaattgtcatgctcaatccagccaacacacgttccattagtaacatgactagccaggagttcgtcgaaaaacttactaagagactgaagcggcaccctgaagagaccggcgggttccaagaagctcccctcgcttacgatgctatctgggccttagctctagccttgaataagactagcggtggcggtggtaggagtggagtgcgccttgaggattttaattataacaaccagacaatcacagatcagatctatcgcgccatgaatagctcgtcattcgaaggcgtttccggccacgtggtgtttgacgccagtggctcacgaatggcatggacactgattgagcagcttcagggcggcagttacaaaaagatcggttactacgactccactaaggacgatttatcttggtcaaagaccgacaagtggatcggaggaagccccccagcagatcagacccttgtgattaaaacctttagattcttgagccaaaagttatttatatccgtgtccgtactttcatctctcggcattgtcctcgctgtggtgtgtctgtcctttaatatctacaattcccacgtgcgctacattcagaattcccaacctaacttaaacaatctgactgcggtgggttgtagcctggcgctggccgcagtgtttccccttgggctcgacggctaccacataggcaggaaccagtttccctttgtatgccaagcgcgtctctggcttcttggcctaggattttcattggggtatggatcaatgttcacaaaaatctggtgggtgcacaccgtgttcactaagaaagaagaaaaaaaggagtggagaaagacactggaaccctggaaactctacgctacagtagggttattggtgggcatggatgtgttgaccctggcaatatggcagatcgtagaccccctgcaccgaacaattgagacattcgccaaggaagaacccaaagaagatatcgacgtgtcaatactgccccaacttgaacactgttctagcaggaaaatgaatacttggctaggaattttttatggatacaaagggttattattgttgctgggcatttttctggcctatgagacaaaaagcgtgagtaccgagaagattaatgatcaccgcgcagtggggatggccatttacaacgtagctgtcctgtgtttgatcaccgctccagtaactatgatcctttctagccagcaagacgccgctttcgccttcgcatccctggctatcgtgttctctagttacatcactctggttgtactgtttgtacccaaaatgcggcgacttataactcgaggagagtggcagagtgaggcccaagacaccatgaagacagggagcagtaccaacaacaacgaagaagagaaaagtcgcctgttagagaaagagaatcgagagctggaaaagattattgcagagaaggaagaacgagtgtcagaactcaggcatcagttacagtctagacaacaactacgatcccgaagacatcctccaactccacccgaaccaagtgggggactgcctcgaggccctccagagcccccagatagactctcctgcgatggttcccgcgtgcatctcctatacaagtag

SEQ ID NO: 14723 - RNA, 339 nt, synthetic construct
  misc_feature 1..339: note = source = /note="Description of Artificial Sequence: Synthetic coding sequence"
  source 1..339: mol_type = other RNA
atgctgactgctgccctggcacctggagccgcaaactctccaacaacgaaccctgtgatcttaatcgtggacaaggtgctcgagacgcaagaccttaatggcgatggactgatgacgcccgccgaactgataaatttcccaggcgtggcgctgcgaccatatccaccatatatcggagtgggtcccaattctaatatgtgcagccgctctgacttgcccgaagatagtaataccctgtaccctggttctcacttgtggcttcgacacgcattgaactccaaaggaaatctggatgcccgactggacgggggggagaaggcaatgcaaccgcaatggtag

SEQ ID NO: 14724 - RNA, 2676 nt, synthetic construct
  misc_feature 1..2676: note = source = /note="Description of Artificial Sequence: Synthetic coding sequence"
  source 1..2676: mol_type = other RNA
atgctcccaacagaagttccccagtctcatcccggcccaagcgcgctgctgctcctgcaacttcttctgccacccacatcggctttcttccccaatatctggtccttgttggcagccccaggatctattacacatcaagaccttacggaagaggcagcactgaatgttacactgcaactgttccttgagcaaccccctcctggccggccacccctgagattagaggactttctcggccgcacgttgctcgccgatgacctcttcgccgcttatttcggccccggctcatcacgacggtttagggcagctctgggtgaagtttcaagggcaaatgctgctcaggactttctccctactagcaggaacgatccagatctacactttgatgctgaacggctgggtcagggtcgcgcacgtcttgtcggcgctttaagagagaccgttgtagctgcccgggcactggaccacacactcgctagacaaaggctgggggcagccctgcacgccctacaggacttttacagtcatagtaactgggtcgagttaggagagcagcaacctcaccctcatctgctttggcccagacaagaattacagaacctggcacaggtcgccgatccaacatgttcagattgcgaggaattgtcttgtcctcgaaactggctgggattcacgctactgacttccggatatttcggcacacatcctcctaaacccccaggcaagtgttcccatggaggccacttcgaccgctcaagctcccagccaccccgcgggggaataaacaaggatagcacaagccctgggttctcacctcatcacatgctgcatttacaggctgctaagttggcactgctggcatctatccaagctttctctctcctgcgctccagactgggcgaccgcgatttttcccggctgctggatatcaccccagcatcttcactaagcttcgtgctcgataccacaggctccatgggcgaagaaatcaatgcggcaaagatccaggcccgccatcttgttgaacagcggcgaggtagtcctatggaacccgttcattacgtactggtccctttccatgaccctggctttggccccgtgtttactacaagcgatccggattccttttggcagcagctgaacgagattcacgctctgggtggcggagatgaacccgaaatgtgcctaagtgccttacagctggccctactacacacccctcctctatccgatatttttgtcttcaccgacgccagtcccaaggacgctttcttaacaaatcaagtcgaatccctcactcaagagcgtagatgtcgggtgacctttctcgttacagaggataccagcagagtgcaaggccgagcccgccgagagatcttgagcccactgcgattcgaaccttacaaagctgtggccctcgcctctggaggcgaagtaatctttacaaaagatcagcacatccgcgacgtggctgccatcgtgggggagtccatggcagcgctggtcactttgccccttgatcctccagttgtagtgccgggccagccattggttttttctgtggatggtctcctgcaaaaaataacagtgcgcatccacggcgacatttcaagtttctggatcaaaaaccctgccggagtatcacagggtcaagaggaaggaggaggacctctgggacacacaagaagattcggtcagttctggatggtgactatggatgatcctccacaaaccggcacatgggagattcaggtgacggctgaggacacacccggagtcagggttcaagcacagacctctctcgatttcctttttcacttcggcatccccatggaagatggtccacatcccggcctttaccctttaacgcagcccgtggcgggtttgcagacacagctgctcgtagaggttacggggctcgggtccagagcaaatccaggagatccccaacctcatttttctcatgtgatcctgcgcggagtgcctgaaggtgccgaactgggtcaggtccctcttgagcccgttgggccacccgaacggggcttgttagccgcctctctgagccccacattgctgtctacaccccggcctttctccctggaactgatcgggcaggacgccgcagggcgtagactccaccgcgcagcccctcagccatccaccgtggtacctgtcctgttggaacttagcggcccatctggctttttggctccaggatcaaaagtacctctcagtctgaggattgcctcattcagcggcccccaagacctggacctcagaacctttgtgaacccaagcttctctttgacttctaacctctccagagctcacctggaattgaatgaatccgcttggggacgactttggcttgaagtgcctgattccgcagcccctgattccgtggttatggttacagtcacagctggaggccgcgaagccaaccccgttccccccactcatgcatttctgagactcctcgtcagcgcccccgccccgcaagatcggcataccacacctacaggctcatcagaccctattcttaccaccgctacacccgcattttcacccttcaccctggtgactcagggccgcgcgggcgcaggactggctgctggatcaccttggtggggaaccgtcggcggcgttctgttgttgctgggtctcgccagctggtag

SEQ ID NO: 14725 - RNA, 2742 nt, synthetic construct
  misc_feature 1..2742: note = source = /note="Description of Artificial Sequence: Synthetic coding sequence"
  source 1..2742: mol_type = other RNA
atgggtcctgaagcgctctcgtccttacttctcctcttactggtggccagtggggacgctgatatgaagggccattttgatcctgcaaaatgcagatacgccctcggaatgcaagacagaactatcccagattctgacattagcgcctcaagctcttggagtgactccactgcggctaggcattccaggttagagtcgtctgatggagacggtgcttggtgtcctgcagggagcgtgtttcctaaagaagaggaataccttcaagtcgacctgcaacgcctgcatctggtagctttggtaggaacacaagggcgacacgccggcggcctaggcaaggaattctctagatcgtacaggctcagatatagtagggatggccggagatggatgggatggaaagatagatggggtcaggaggtgatcagcggcaatgaagatccagagggcgtggtgcttaaagatttgggtccccccatggtggcaagattggtcagattctatccccgagccgatagagtgatgagtgtttgtcttcgggtagaattgtatggctgtctgtggagagacggtttgttgtcctacaccgcccccgttgggcagaccatgtatctaagtgaggcagtgtatctgaacgattcaacttatgacggacacacggttggaggcctgcaatatgggggactaggtcagcttgctgatggagtggttgggttagatgattttaggaagtctcaagagctgcgcgtctggcctggctacgactatgtgggatggagcaatcactcattttctagtggctacgttgagatggagttcgagttcgacagattaagggcttttcaggctatgcaagtacattgtaacaatatgcatacactgggtgcccgtcttcccggcggtgttgagtgcaggtttagacgaggcccagccatggcttgggaaggcgagcccatgaggcacaatctaggaggcaatctgggggaccccagagcaagggccgtgtcggtgcctttagggggccgggttgcccggtttctgcaatgcaggtttctgtttgctggaccttggctattattttcagaaatctccttcattagtgacgtcgttaacaattcttctcctgctttaggcggcacttttccccctgctccttggtggccccctggaccccctccaacaaattttagtagtctggaactcgagcctcggggtcaacagccagttgcaaaggctgaggggtctcccactgctatcctaattggttgtcttgtggctattatccttttactgctgctgattatcgcacttatgctttggcgtctgcattggcgacgactgctctctaaggcagaacgaagggtcctggaagaagagctgactgttcatcttagcgtgcccggagatacgatccttataaataaccgccctggacctagagaacccccaccataccaggagccccgtccccgaggaaaccctcctcattctgcaccttgcgtgccaaacggatctgctttattactcagtaaccccgcctaccgattactcctcgctacatatgcgcgcccacccagaggccccggccccccgactcccgcttgggctaagcccaccaatactcaggcttatagtggtgattacatggagcctgaaaagccaggagcacctcttttaccacctcctcctcagaatagcgttcctcactacgccgaggctgatatcgtcactctgcaaggggttaccggtggcaatacctatgccgtgcctgcactccccccaggagccgttggcgatggcccaccccgcgtggacttcccaaggtctcgcctcagattcaaagaaaagttaggggagggccaatttggcgaggttcatctgtgtgaggtggacagcccccaagaccttgtctcgcttgatttccccctaaatgtgcgaaagggccatcccttactcgtggcagttaagattctaagaccggatgctacaaaaaatgccagaaatgattttctcaaagaagtaaagatcatgtcgagactcaaggaccctaatataatccgccttcttggggtttgcgtacaagacgatcctctgtgtatgataactgactatatggaaaacggggaccttaaccagttcctcagtgcgcatcagctcgaggataaagccgcagagggcgcgcccggcgacggacaggcggcccaaggtccaactatatcctaccccatgttactacacgtcgccgctcaaattgcatccgggatgcgctatttggccacattgaactttgtgcatcgggacctagctactcgcaattgcttagtgggtgagaactttactattaagatagctgattttggaatgtcccgcaatctctacgccggcgactattaccgagtgcagggtagagccgtgcttcctattcggtggatggcatgggaatgtatcctcatgggaaaatttactaccgcctctgatgtctgggcctttggcgtaactttgtgggaagttctgatgctgtgccgggctcagcccttcggacaactaacagacgaacaagtgatcgagaatgccggagaattcttccgagaccaaggtcgtcaggtttatttatccagaccacctgcctgcccccaaggcctgtacgaactaatgctgcgctgttggagtagggagtctgaacagcgaccccccttctcccagctacatcgatttcttgccgaggatgctctaaataccgtctag

SEQ ID NO: 14726 - RNA, 390 nt, synthetic construct
  misc_feature 1..390: note = source = /note="Description of Artificial Sequence: Synthetic coding sequence"
  source 1..390: mol_type = other RNA
atggccgccggatcagcaccaatgcaactgcacctgagggcgacaatacgcatgaaagacggcctgtgtgttccaaggaaatggatttatcacctgacagaggggagtaccgacctgaggacggagggaagaccggacatgaaaacagaattgttttcaagctcatgtcccggtggtatcatgctgaatgagacgggacaagggtatcaacgctttctcctgtacaaccgatcaccgcacccacctgagaaatgtgtggaggagtttaaatcactcacttcctgcctagattctaaagcttttttactgactccaagaaaccaagggaaaggattgaagagccacaaaactgggctgggcctcactaagtcatctggcgtcaccggctag

SEQ ID NO: 14727 - RNA, 846 nt, synthetic construct
  misc_feature 1..846: note = source = /note="Description of Artificial Sequence: Synthetic coding sequence"
  source 1..846: mol_type = other RNA
atgctgcccaaatccagaagagcccttaccatccaggaaatagctgcactggcccgatcatcgctgcacggaatctctcaagtcgtaaaggatcatgttacaaagcccaccgccatggctcaaggtcgggtggcacacctgattgaatggaagggctggtctaagccttccgacagccctgctgccctcgaatcagcctttagcagctactccgacctctcagagggagagcaggaagcaagatttgctgcaggtgtagccgaacagtttgctattgctgaggcaaaattacgagcatggtccagcgtggacggagaggacagtactgacgacagctatgatgaagacttcgctggtggaatggatactgacatggcaggacagcttcccctgggacctcacttgcaggatttgttcacaggacatcgcttctcccgaccagtgcgacagggaagcgtggaacctgaatccgactgttcacagacggtttcccctgacactctgtgttcctccttgtgtagccttgaagacgggctcctcggctcacctgcacgcctcgcaagtcaattgctgggggacgagctgctgctggctaaactgcccccctcccgcgagtcagccttcagatcactaggccccttggaagcacaggactccctgtacaactcccctctgaccgagtcctgcttgtcccccgctgaagaagagccagccccttgtaaagactgtcaacccctgtgccccccactcactggtagctgggagagacagagacaggctagcgacctggcaagcagtggcgtagtttccttggacgaagacgaggctgaacccgaagaacagtag

SEQ ID NO: 14728 - RNA, 444 nt, synthetic construct
  misc_feature 1..444: note = source = /note="Description of Artificial Sequence: Synthetic coding sequence"
  source 1..444: mol_type = other RNA
atgggccctgaagcgctgagcagcctgttattgctactactcgtcgcctctggcgacgcagatatgaagggccattttgaccccgctaaatgtagatatgctctgggaatgcaggacagaacaattcctgactcagatatcagcgcttcctccagctggagtgatagtactgccgcacgacactccagactcgaaagtagcgacggcgatggtgcctggtgcccagccggctcagtgttcccaaaagaggaagagtacctacaggtggacttacaaagactgcatctggttgccctagtgggaacgcaaggaagacacgccgggggcttaggaaaagaattcagcagaagttatagattgaggtatagcagggatgggagaagatggatgggttggaaggaccgctggggacaggaggtgattagtggaaacgaagacccgtag

SEQ ID NO: 14729 - RNA, 2631 nt, synthetic construct
  misc_feature 1..2631: note = source = /note="Description of Artificial Sequence: Synthetic coding sequence"
  source 1..2631: mol_type = other RNA
atgggacccgaggccctgtccagcttgcttttgctcctgcttgtggcctcaggagacgccgatatgaagggccattttgaccctgccaaatgccgctatgcattaggaatgcaggacaggactatccccgattctgacatctcagcgagctccagctggtctgattctacggctgcaagacactctcgcctcgaatcctcagacggagatggagcctggtgccctgctggcagcgtattcccaaaggaagaagaataccttcaagtggacttacagcgcttgcatctcgtggcactcgttggaacacaggggagacacgcgggggggctcgggaaggaattctctaggtcctatagactgaggtacagcagagacggccggagatggatgggatggaaagaccgctggggtcaagaagtgattagtggtaacgaagatcccgagggggttgtgctcaaagatctcggcccacctatggtggctagactcgttagattttatcctcgagccgatagagtgatgtctgtgtgtttaagagttgagctgtatggatgtctttggcgcgacggtcttttgagttacactgcccccgttggtcaaacgatgtacctctctgaagcagtgtatctgaacgattctacgtacgatgggcatacggttgggggcctacagtatggtggactgggacagcttgccgatggcgtggttggattggatgattttagaaagtctcaggagctccgcgtgtggcctggttacgattatgtcggttggagcaatcattcattttcttccggctatgtggagatggagtttgaattcgatagactaagagcatttcaagctatgcaggttcattgcaacaatatgcacacactgggagcccgactgcccgggggggttgaatgccgatttcgaagagggccagctatggcttgggaaggggagcccatgagacataacctgggaggaaatttgggggatcctcgggcaagagcggtcagtgttcctctgggaggacgggtggccagattccttcagtgcagattcttattcgcagggccatggcttctgtttagcgagatttcgtttatctccgacgtagtcaacaactcatcaccggcactgggtggaactttccctcctgccccatggtggcctcccggacctccacccacaaacttttcatctctggaactagaacctagggggcagcaacctgtcgcaaaagccgagggctcccctactgcaattcttatcggttgcttggtagccatcatccttctgctcttgttgataattgccctcatgttgtggcggctacattggagacggttgttaagcaaggctgagcgtagagtccttgaggaggaactgacggttcatttgagcgtacccggggatacaattctgatcaataaccggcctggaccacgcgagccccctccctaccaggaaccccggccccgcggaaatccaccccattccgcgccatgcgtgcccaacggatcagcttactccggagactacatggagccagagaaaccaggcgctcctcttctgcccccacctcctcaaaattccgtgccacattatgccgaggctgacattgtcacattgcagggcgtaactggcgggaacacttacgcagtcccggccctgccacctggtgcagtcggagatggtcctccccgggtggatttccctcggagccggctccgctttaaagaaaaactgggagagggtcagtttggagaagtacacctgtgtgaggtcgactctccccaagatcttgtgtctttggactttccactcaatgtaagaaaagggcacccactgctagtggcagtaaaaatcctgaggcctgacgctactaaaaacgctaggaacgactttctaaaagaagtgaagataatgtcaagacttaaggacccaaacatcattagattactgggcgtttgtgttcaggatgatcctctatgtatgatcacagactacatggaaaatggcgacctgaatcagttcctctctgcgcaccaattagaggacaaggctgccgaaggggctcccggagatggccaggccgctcagggaccaaccatctcttatcctatgctactacacgtagccgcacagattgccagcggaatgagatatttagcaacactgaacttcgtacaccgggaccttgccactcgaaattgcttggtgggagagaacttcacaatcaaaatagccgattttggaatgtcccgaaatctatacgcgggcgattactatcgggtacagggaagagccgtgctaccgattagatggatggcgtgggaatgtattctaatgggaaagtttacaactgctagcgacgtgtgggccttcggggtcactctgtgggaggtactgatgctttgtcgagcacagccattcggccagctgaccgacgagcaagtcattgaaaatgcaggcgaatttttccgagaccaaggtagacaggtgtacttgagcagacccccagcttgccctcagggcctctacgaattaatgttgagatgctggtccagagagtctgaacaacgcccacctttctcccaattgcacagatttttggctgaggacgcattgaataccgtatag

SEQ ID NO: 14730 - RNA, 1749 nt, synthetic construct
  misc_feature 1..1749: note = source = /note="Description of Artificial Sequence: Synthetic coding sequence"
  source 1..1749: mol_type = other RNA
atggatttcttgctcgccctagtgttggtctcatcactgtatcttcaagccgctgccgaatttgacggaagatggcctagacagatcgtgtcgagcatcggactttgtcgatatgggggtagaatagattgttgttggggatgggctcgacagagttggggacagtgccagccattctacgtattacgtcagcgtatcgctcgcataaggtgccaactaaaggcagtgtgtcagccaagatgtaaacacggtgaatgcattggaccaaataagtgcaagtgccacccaggttacgctggcaaaacttgcaaccaggatctgaacgagtgtggcctcaaacctcgcccatgcaaacaccgttgcatgaatacctacgggagttataagtgctattgtcttaacggatatatgctgatgccagacggaagttgttcatccgcgctaacatgctcaatggcgaattgccaatacggctgcgacgtggtcaaaggacagataagatgccaatgcccatcacccggattgcagctcgctccagatggtcgcacgtgcgtggacgtcgatgaatgtgcaacaggacgcgcctcctgcccacggtttcgccaatgcgttaacacttttggtagctacatctgtaaatgtcacaaaggcttcgaccttatgtatataggcggcaaataccagtgtcacgatattgacgagtgtagtctgggccaataccagtgctcttcctttgcccggtgctataacataagaggcagctacaaatgtaagtgtaaagaaggttatcagggcgacggcctgacttgcgtgtacatcccaaaagttatgatcgaaccaagcggcccaattcacgtgccaaagggaaacggcactattttgaaaggtgacaccggcaacaataactggattccagacgtggggtctacgtggtggccccccaaaactccttacatccctccgataattacgaaccgtccaacttctaaaccaacaacccgccctactcctaaacctacgcctattcctactcccccacctccccctccattacccactgaactcaggacccccctgcccccaaccacccccgaaagacctaccacaggactgacaacgatagccccagcagccagcacaccaccaggaggaataactgttgacaatagggtgcagaccgaccctcagaagccaagaggtgacgtgttcattccccggcagccaagtaatgatttgttcgagatctttgaaattgagagaggagtgtccgctgacgatgaagctaaagacgaccccggcgtattggtccacagctgcaactttgatcacggcttgtgtggctggatccgggaaaaagataatgatctgcactgggaacctatcagagaccctgccggcggacagtacctaaccgtttccgctgccaaagcccctggtggaaaggcagcccgcttggttctcccgctgggacgcttaatgcattcaggagacctctgcctcagcttccggcacaaggtaactggattacacagcggaacccttcaggtgtttgtgcgaaaacacggggcccatggagctgcactgtggggcagaaatggcggacacggctggagacaaacccagattacacttaggggcgctgatattaagagcgtggtcttcaagggcgaaaaaaggaggggccacacgggcgagattgggctggatgacgtgtcactgaaaaaggggcattgcagcgaggagcgctag

SEQ ID NO: 14731 - RNA, 1602 nt, synthetic construct
  misc_feature 1..1602: note = source = /note="Description of Artificial Sequence: Synthetic coding sequence"
  source 1..1602: mol_type = other RNA
atggggtccagtcggctggcagcattgctcctcccactgctgttgatcgttatcgacctgtctgactccgcggggatcggattccgccatctccctcactggaacacccgatgtcccctcgcctctcacaccgacgacagtttcaccggaagtagcgcttacatcccttgcaggacttggtgggccctcttttctactaagccttggtgcgttagagtatggcactgctcacgctgtctgtgtcagcacttattatcaggcggctcaggtttacaacgtggactttttcatctattagtgcaaaaaagcaagaaaagctctaccttcaagttttatagaaggcataagatgcccgcccccgcacagcgaaagcttcttcccagacggcacctaagcgagaagtcacaccacatatctatacccagtcccgacatttcacataaaggattgcgctcaaagcggacacagcccagtgaccctgaaacttgggaatcccttcccagactagactcacaaaggcatggcggccctgaatttagcttcgatctgctccccgaggctcgagccatacgagttacaatatctagcggtccagaggtttccgtcagattatgccaccagtgggccctcgaatgcgaagaactaagtagcccatacgacgtacagaagattgtgagcggtggacacacggttgagcttccttacgagtttctgctcccttgtctgtgcattgaggccagctacctccaggaggacaccgtccgccggaaaaaatgtccatttcaaagctggcccgaagcctatggctccgatttttggaaatccgtgcattttacagattattcccagcatacacaaatggtaatggctcttacattacggtgccccttgaaactggaggccgctctttgtcagcggcacgactggcatacactgtgtaaagacctccctaatgccaccgcacgcgaatctgatggctggtacgtcctggaaaaagtcgacctgcatcctcaactatgctttaaattttcattcggcaactcaagtcatgttgagtgtcctcaccagacggggtccctcacaagctggaatgtttccatggatacacaggcgcagcaactcattctgcatttctcctcgcgcatgcatgccaccttcagcgctgcctggtctcttccaggcctggggcaagacaccctggttccaccagtttataccgtctcccaggctcgcggctcttctcccgtctcccttgatctcatcataccttttctgcggcccggatgctgtgttttgctacacgccagccttagctcacccggaggagaagacgcatggctgatcggcgtggggggaagtgttcccagcggcgtggccgtccgctgccccgtctgcctggaagcccccctcgtctccggttgtctgctccagactcccggcgccctggacccaggcacagcaggtcccccgcatcctactggctgctgcagtggcccccatctgccagctccaactgtaaggcctggaccatctgcggcatcagcaccccctgcgcggggcggattggggggagcagccgcccctggaggtagcgctggttag

SEQ ID NO: 14732 - RNA, 1293 nt, synthetic construct
  misc_feature 1..1293: note = source = /note="Description of Artificial Sequence: Synthetic coding sequence"
  source 1..1293: mol_type = other RNA
atgggcgtaagtaagcttgacatactttatcgacggcttctactcacaaagctatttatccggggctggggaaggcccgaagacttgaaaaggctgttcgaattcagaaaaatgataggcaatagggagcgatgccagaacttggtaagttccgactatccggttcatatagacaagattgaggagcagagtgattgtaagattcttgatggccactttgtgtccccgatggcccactacgtgccagacatcatgcccattgagtccgttattgcaaggtttcaattcatcgtccccaaggagtggaactccaagtatcgcccagtctgtattcacctcgctgggactggggaccatcattattggaggagaagaactttgatggcaaggccaatgataaaagaagctcgcatggcctctctgcttcttgaaaacccctactacggctgtcggaagcccaaagatcaggtgcggtctagtttaaaaaacgtttccgatctctttgtcatgggcggggcactggtcctggaaagcgctgctctgttgcactggctcgaacgcgaaggttatggaccactaggtatgactggaattagcatgggaggccatatggcatcactggctgtcagcaactggccaaaacctatgccactgatcccctgcctttcttggtctacagcgagtggcgtgtttacaactaccgacagctttaagatgggacaggaattcgtcaaacatttcacttcttccgccgacaaactgacaaatcttaatctggtgagccggacactgaacttggacatttctaaccaggtggtgagccaaaagcctgccgactgtcacaactctagcaaaactagcgtgtcagccacctccgagggcctgctcctgcaagacactagcaaaatgaaaaggttcaaccaaacgttatctacaaataaaagcgggtacacctcaagaaacccccagagctaccacctcttgagtaaggaacagtccagaaacagtctgagaaaagagtctctgatctttatgaaaggagttatggatgagtgcactcatgtcgcaaacttttctgtgccagtggatcctagcctcatcatcgtggtccaagccaaggaagacgcttacatccccagaactggtgtgcgtagtctgcaggagatttggcctggctgcgaaatcagatacctcgaaggtggacacatttccgcatacctgttcaaacaaggcctcttccgccaagccatctatgacgctttcgatagatttttgcacaaatacgccaactag

SEQ ID NO: 14733 - RNA, 2631 nt, synthetic construct
  misc_feature 1..2631: note = source = /note="Description of Artificial Sequence: Synthetic coding sequence"
  source 1..2631: mol_type = other RNA
atggggcccgaggcgctctcatctcttttactcctgctcctggtcgcctccggtgatgctgatatgaaaggacacttcgatccggccaagtgtagatacgccctgggtatgcaagacagaacaatcccagactctgatattagcgcaagttcctcttggagcgacagtaccgccgctagacattctaggctcgaatccagtgacggcgatggggcgtggtgccccgccggcagcgtgttccctaaggaggaagaatatctccaagtagaccttcaacggctccatctggtcgcattagtgggtacacagggcagacatgccggaggcctgggtaaggaatttagtaggtcttatcgactccggtacagcagagacggacgaagatggatgggatggaaagacaggtggggccaggaggtgatcagcgggaatgaggatcctgagggcgtggtgttgaaggatctggggccgcccatggtggctcggctggtgcggttctatccgagagctgatagagtcatgagtgtgtgcttgagagtggagttatatggatgtttgtggagggacggacttctgtcatacacagctcctgttgggcagactatgtacctgtccgaggcagtctaccttaacgattcaacatatgacggacacacagtaggcgggttacagtacggagggcttggccagcttgcagatggagtggtaggacttgacgactttcgcaaaagtcaggagttgcgcgtgtggccaggttatgattatgtgggatggtcaaaccacagtttttctagcggctacgtcgagatggagtttgagtttgataggcttcgagcctttcaggctatgcaagtgcattgtaacaatatgcacaccctgggagcaagattgccaggaggagttgagtgtcgcttccgaagaggccccgcaatggcttgggagggtgaacccatgagacataacctgggtggcaatttgggagatcctcgtgcccgggcagtctctgtccctctgggcggtagggtggcacgcttcttacagtgtcggttcttgttcgccggcccctggttgctgttctcggagatttcatttataagcgacgtggtcaacaacagctccccagcgttgggcggaacctttccgccggctccgtggtggcctccaggaccccctcccacaaactttagcagtctggaattggaacctcggggtcagcagcctgttgccaaagccgagggttcacccaccgctatcctgatcggatgtttggttgccatcattttactgttgcttttgattattgccctgatgctatggagactccattggaggcgcctcctctcgaaggcagaacgacgggtgctggaagaagagctgaccgtgcacttaagtgtacctggcgatacaatccttataaacaaccgccctgggcctcgggagcctcccccttaccaagaaccaagacctagaggcaatcctccacactctgctccctgcgtacccaacggctcagcctacagcggagactatatggaacctgagaaacctggcgcacccctgctgccccctcccccccaaaactcggtaccacactacgcggaagccgatatcgtcacacttcaaggagtaacgggaggaaatacctatgctgtacccgctttgccacccggcgctgtcggcgatgggccaccacgggttgattttccaaggtccaggcttaggtttaaggaaaaattaggcgaggggcagtttggggaggtccatctgtgtgaggttgacagtccacaagaccttgtttctctagactttcccctgaacgttagaaaaggtcatccgcttttggtcgccgtgaagattctaaggccagacgctaccaagaatgcccggaacgatttcctcaaagaagtgaagatcatgtcacgccttaaagatccgaacattatcagattgctgggcgtatgtgtgcaggatgacccattgtgcatgattactgattacatggaaaacggagacctgaaccagtttctgtcagcgcatcagctcgaagataaggccgcagagggggcacctggagatggccaagcagctcaaggaccgactatctcgtatccgatgctgctgcacgtcgctgctcaaatagccagtggaatgaggtacctggctacactaaattttgtgcacagggatctggcgacgagaaattgtctggtgggagaaaacttcacaataaagatcgctgatttcgggatgtctcgcaatttatacgccggggattattaccgcgtacagggccgtgctgttctgcctattaggtggatggcctgggaatgcatactaatgggaaagtttactactgcatcagacgtctgggcatttggcgtaacgctatgggaggttcttatgttgtgtcgcgcccagccatttggtcaacttacagacgaacaggtgatcgaaaacgcaggagagtttttcagagatcaaggtaggcaagtgtatcttagtaggccaccggcctgtcctcaaggactatacgagctgatgctgcgttgttggtcacgggaatctgagcagcgcccacctttcagccaactgcaccgcttccttgccgaagacgctctgaataccgtatag

SEQ ID NO: 14734 - RNA, 237 nt, synthetic construct; identical to SEQ ID NO: 13095
  misc_feature 1..237: note = source = /note="Description of Artificial Sequence: Synthetic coding sequence"
  source 1..237: mol_type = other RNA

SEQ ID NO: 14735 - RNA, 2631 nt, synthetic construct
  misc_feature 1..2631: note = source = /note="Description of Artificial Sequence: Synthetic coding sequence"
  source 1..2631: mol_type = other RNA
atgggtcctgaagccctatcttccctgctccttctgcttctggtggctagtggtgacgccgacatgaaaggacattttgatccagccaaatgtaggtatgcgttaggtatgcaagacagaactatacccgactccgatatctcagcatcttcatcttggagcgatagtaccgctgcccgccatagtcgtctcgagtcatctgacggggatggtgcttggtgccccgcgggttctgtgtttcctaaggaggaagaatatctccaagtggatcttcaacgtttgcacttagtggcacttgttgggacacagggcagacatgctgggggcttgggcaaagaattttctaggtcttataggttgaggtattctagagatggcaggcggtggatggggtggaaggatcggtggggacaggaagtgatcagcgggaatgaggacccagaaggagtggtgctaaaggacctaggaccccctatggtggctcggctcgttagattctatccaagagcagatagagtgatgtcggtgtgcctgcgcgttgagctgtatggctgtttatggcgggatgggttgctctcgtataccgccccagtgggtcaaactatgtatctgagtgaggcagtatatcttaacgacagcacatatgatggtcacacagtcggcggccttcaatatggcgggctcggacagctggccgacggagtggtgggcctggatgactttcgtaaatcccaggagctaagagtatggccgggatacgattacgtcgggtggtctaatcatagcttctcgtccggatatgtcgaaatggaatttgaattcgatcgtctgagagcttttcaagcaatgcaagtccattgcaataacatgcacacccttggagctcgcctcccaggcggagtcgagtgtagattcagacggggacctgcaatggcatgggagggggaaccaatgcgacataacctcggcggtaatctgggcgatccacgggctcgcgctgtgtctgttccgctcggcggacgtgtagctcgctttcttcaatgcaggttcctatttgctggcccttggctcctgtttagtgaaattagttttatatccgacgtggtaaacaacagcagcccagcactgggcggcacgtttcctccagctccttggtggccaccggggcctccccccactaacttttctagcctggaactggagccaagaggtcagcaaccggtcgccaaagctgaaggcagccccaccgctattctaattgggtgcctggtcgctatcatactactcttgcttctgataattgccctgatgttgtggagattgcattggcgccggctgttgagcaaggcagaacggcgggttctggaggaagaactgacagtacacctcagtgtcccaggcgacaccatccttatcaacaatcggccaggacctagagagccacccccatatcaagaaccacgtcctcgaggaaaccccccacactcagctccatgtgttcccaacggctcggcctatagcggagattacatggaaccagagaagccaggtgccccacttcttccccccccaccccaaaactcagtaccccactatgccgaagcggatatcgtgactcttcagggtgtgacaggcggcaatacctacgctgtgcctgccttgcctcctggtgcagtaggtgacggacctccccgcgtggattttcctcgctctcggttgaggtttaaagagaagttaggcgagggccagttcggcgaggttcatctttgcgaagtcgactcaccccaagacttggtttccctcgactttcctctgaacgtgagaaaagggcatcccctgcttgtggctgtaaagatactaaggcctgacgcaacaaagaacgccaggaatgatttcttaaaagaggtgaagatcatgtcccgactgaaagacccaaatatcatccggctcctgggagtgtgtgtgcaggatgacccgctgtgtatgatcaccgactatatggaaaatggagacctcaaccagttcctgtccgctcatcaattggaagataaagccgctgagggcgctccaggcgatggccaggctgcgcaaggtcccaccatttcctatcctatgttactacatgtcgctgctcagattgctagtggcatgcgatacctggctacgcttaactttgtgcacagagatctagcgacgcgtaactgcctcgtgggcgaaaacttcactatcaaaatagccgattttggaatgtcacgcaacttatacgccggcgactactacagggtgcaagggagagcagtccttccaattaggtggatggcatgggagtgtatcttaatggggaaatttacaacagccagcgatgtttgggcttttggagtcacactttgggaggttcttatgctgtgtcgcgctcagccattcggacagcttaccgacgaacaggtcatcgagaatgcaggggaattttttagagatcaaggcaggcaagtctacctttcaagaccacccgcttgcccccaaggattatacgaactcatgcttcgctgttggtctagggagagcgaacagagaccgccattttcccaactgcaccggtttctggctgaagatgccttgaatacagtctag

SEQ ID NO: 14736 - RNA, 1257 nt, synthetic construct
  misc_feature 1..1257: note = source = /note="Description of Artificial Sequence: Synthetic coding sequence"
  source 1..1257: mol_type = other RNA
atgagaactctcttcaacttgctgtggctcgcactcgcttgctcccctgtgcacactaccttgagtaagagcgatgcaaagaaggctgccagcaaaacactgctagagaaggtgaagttttgctcctgttgccccggttggtctgcaatggctcggtcctggcttacagctacttctgcgacacagagccaattcagcgataagcctgttcaagaccgaggactggtagttaccgatctaaaggcagagtccgtggtgctcgagcatcgatcttattgttcagctaaagctcgcgatcggcactttgctggagacgtgctgggctacgtgacgccttggaactcccatggatacgacgtgaccaaggtctttggcagcaagtttacacagattagccccgtgtggctgcaattgaaacggcgagggagggagatgtttgaggtgacagggctacatgatgtggatcaagggtggatgagagctgtgaggaaacatgctaagggactgcacatcgtgcctagactcttgtttgaggactggacctatgacgacttccgtaatgtgctcgactctgaagacgaaatcgaggaactgtccaaaaccgttgttcaggtcgccaaaaaccagcactttgatggctttgtggtagaagtttggaaccagctgttgagccaaaagcgggtaggcctgattcatatgctgacacaccttgcagaggccctgcaccaagcacgtttgctggccttactagtaatccctcctgccattactcccggtactgatcagctggggatgtttacacataaagaattcgagcagcttgcgcctgtgttagacggtttcagcctcatgacctacgactactccaccgcgcaccagcccgggcccaacgcacccttgtcttgggtgcgtgcatgtgtgcaagtccttgacccaaaaagcaagtggaggagcaagatcttacttgggctgaatttttacgggatggactatgcaactagcaaggacgcccgcgaacccgtagttggagcccgatacatccagacactgaaggaccatcgcccccgtatggtgtgggattcgcaggcaagcgagcatttttttgaatataaaaaatcccgctcaggaagacatgtggtgttctatccaactctcaaaagtctccaggtgcggctcgaactcgctcgggaacttggcgttggagttagtatctgggagctggggcagggactggattatttttatgacctcttgtag

SEQ ID NO: 14737 - RNA, 390 nt, synthetic construct
  misc_feature 1..390: note = source = /note="Description of Artificial Sequence: Synthetic coding sequence"
  source 1..390: mol_type = other RNA
atgcgcaagcccaggaggaagtcccggcagaacgcggagggtagaagaagtccttctccttacagcctcaaatgctctccaactcgcgaaactctgacttatgcacaggcacagcgcatcgtagaagtagatattgatggcaggttacaccgaatttcgatctacgatcctctcaagatcataacagaagacgaactcaccgcgcaggacatcacagagtgcaacagcaacaaggaaaattcagaacagccacagttccccggtaagtctaagaaaccctcaagtaaaggaaagaaaaaggagtcttgctccaaacacgcgtccggcacttcatttcacctcccccaaccctcttttcgtatggtggactcaggaattcaacctgaatag

SEQ ID NO: 14738 - RNA, 315 nt, synthetic construct
  misc_feature 1..315: note = source = /note="Description of Artificial Sequence: Synthetic coding sequence"
  source 1..315: mol_type = other RNA
atgcgagtagtgactatagtcatcctcctgtgcttttgcaaagcagcagaattaagaaaagctagccccggtagcgtgcgatctcgagtaaatcatggacgggccggtgggggaaggaggggatcaaatccagtgaaacgatatgctcccggactgccctgcgacgtttatacgtacctccacgagaagtacctcgattgccaggaacggaaactagtatatgtgttaccagggtggccccaggacctactgcacatgctccttgccagaaataagatcaggacactcaagaataatatgttctctaagttctag

SEQ ID NO: 14739 - RNA, 639 nt, synthetic construct
  misc_feature 1..639: note = source = /note="Description of Artificial Sequence: Synthetic coding sequence"
  source 1..639: mol_type = other RNA
gacttcgggtactgtccccgagtgtattgcgaaaaccaacccatgctaccaatcggagttctcgtaatggtcgggttcactgtgggcaaagtccccgtgccagatattagaacctgtcatttttgtctagttgaagacccatcggtggggtgcatatctggatccgaaaagtgtaccatctcttcttccagcttatgcatggttataaccatatactacgacgtcaaagtgcggtttatcgttagaggctgcggccagtatatttcctatcgatgccaagaaaaacgaaacacatattttgcagaatattggtatcaggcacagtgctgtcaatatgattattgcaacagttggtctagcccgcagctacagtctagcctccccgagccccacgatcgacccttggctctccctttgtctgactcccagattcaatggttttatcaagccctaaacctcagtcttcccctgcccaactttcatgccgggactgagcctgatggactggatcccatggtcacgctctcactcaacttgggcctttcatttgcagagttgcgcaggatgtatttgttcctcaattcctccggcctgctcgtcctcccccaggccggattactcactcctcacccctcttag

SEQ ID NO: 14740 - RNA, 1005 nt, synthetic construct
  misc_feature 1..1005: note = source = /note="Description of Artificial Sequence: Synthetic coding sequence"
  source 1..1005: mol_type = other RNA
atgctggctttagctaaaatcctgctcatctctaccctattctactccctgttgagcggttctcacggaaaagaaaatcaggacattaatactacacagaacatcgcagaagtcttcaaaaccatggaaaataaacccataagtctcgaaagtgaagccaatctcaactcagataaggaaaacataacaacatcgaatctgaaggcctctcattccccccccctaaacttacccaacaactcacacggcataaccgacttctctagcaactcctccgccgaacactcgctgggatccctgaaaccaaccagtacaatatctacgtctccgccactgatccatagttttgtcagcaaagtgccctggaatgcccctatcgctgacgaagatctccttcccatttccgcgcaccctaatgccacaccggccctcagttctgagaactttacatggtccttagtcaacgacactgttaagacacccgacaactcatccataacggtttcaattctgtcctccgagccgacatctccctctgtcacaccattgatcgtagagccaagtggatggctcaccactaactccgacagcttcacagggtttaccccttatcaagaaaaaacaactctgcagccaactcttaaattcacaaacaactccaagcttttcccaaacaccagtgatccccaaaaggaaaatcggaatacaggaatagttttcggtgccatcttgggtgcaatccttggtgtgtccctgttgaccctggtgggatatttgctctgcggcaaaaggaagaccgatagcttttcccatagacgattgtatgacgataggaatgaaccagtcctgcgcctggataacgcccctgaaccttatgacgtgtcctttggtaacagcagctactataatccgacactgaacgatagcgcaatgccagagagcgaggagaatgcaagagacggaattcctatggatgacatacctcccctgagaacctccgtgtag

SEQ ID NO: 14741 - RNA, 987 nt, synthetic construct
  misc_feature 1..987: note = source = /note="Description of Artificial Sequence: Synthetic coding sequence"
  source 1..987: mol_type = other RNA
atggggcctgcaggatgcgcttttactctcctgctcctcctcggaatcagtgtgtgcggacagccggtctactctagtagggtcgtgggcggccaagacgcagctgcaggaagatggccatggcaagtcagtctgcatttcgatcataattttatttgtggcggttctctagttagtgaaaggctcatactcaccgctgctcattgtatccagccgacttggaccacattttcttatactgtgtggctgggatctattacagttggtgacagtcgaaaaagagtgaagtattacgtctccaagatcgtcatccacccaaaatatcaggacactaccgcagacgtcgcactcctgaaactctcttcccaggtcacctttacatcggccattttaccgatatgtcttccctcagtaacaaagcagctcgctataccccccttctgctgggtcacagggtggggaaaggtaaaagaatcatcagaccgggattatcatagcgctctccaggaagcagaagtgccaatcatagacaggcaagcatgtgaacagctgtataacccaatcggcatttttctcccagctttggaaccggtgattaaggaagataagatctgtgctggcgatacacaaaacatgaaggatagctgtaaaggtgattctggtggcccactatcatgccacattgacggtgtttggatacagactggggtcgtgagttggggtctcgaatgcgggaaatccttgccgggcgtgtacaccaacgtgatttactaccaaaaatggatcaatgcaactatctcgcgagcaaataacctagacttctctgactttctgttccctattgtccttttgtctctcgccctgctgaggccatcctgtgcattcggtcctaacaccatccacagagtcgggaccgtagcagaagcagttgcctgtattcaagggtgggaagaaaacgcctggagattttcacctagaggccggtag

SEQ ID NO: 14742 - RNA, 453 nt, synthetic construct
  misc_feature 1..453: note = source = /note="Description of Artificial Sequence: Synthetic coding sequence"
  source 1..453: mol_type = other RNA
atgcgctttatggccggccccgccgggtcccaaagcttaggtcccctctgttttcattctagtccccaggcactgtataccgtgctgctgattgtgctcgttatgatgtcactggtgttcggaaagtttgtgccagtcaattgggagcctccccagcctctgcccttcccaaaataccttcgctgttatcgctgtctgctggagacaaaagaacttggctgcctccttggcagcgacatttgcctgacccccgccggatcaagctgcattactctccacaagaagaattcctctggctccgatgtgatggtcagcgactgtcgttccaaagaacaaatgtccgattgcagcaatacaagaacctccccagttagcggtttttggatcttctctcaatactgctttttggatttctgtaatgatccccaaaaccgcgggttgtatacaccctag

SEQ ID NO: 14743 - RNA, 234 nt, synthetic construct; identical to SEQ ID NO: 13104
  misc_feature 1..234: note = source = /note="Description of Artificial Sequence: Synthetic coding sequence"
  source 1..234: mol_type = other RNA

SEQ ID NO: 14744 - RNA, 1143 nt, synthetic construct
  misc_feature 1..1143: note = source = /note="Description of Artificial Sequence: Synthetic coding sequence"
  source 1..1143: mol_type = other RNA
atggccctcactcccggctggggaagtagcgccggccccgttcgccctgagctgtggttgctcctgtgggctgctgcctggaggctgggagccagtgcatgcccagcactgtgcacttgcaccggcactaccgtcgattgccatggaacgggcttacaagctatccctaaaaacataccaagaaacaccgagcgactagaactgaatggtaataatatcaccaggatccataagaatgatttcgccgggctaaagcaactccgagtattgcagctgatggaaaatcagattggcgcggttgaaagaggcgcatttgatgatatgaaagaactcgagcgtttagacctgagcgagaatgcaatccaggccatccccaggaaggcttttagaggggcaaccgacctgaaaaatcttcaacttgacaagaaccaaatcagttgtatcgaagaaggggcgttccgggctctgcgaggactggaggtactgactcttaacaacaataatatcacaactataccagtttcttcgtttaaccacatgcccaaactgcgtaccttccgacttcactccaatcatctcttctgtgattgtcacctcgcctggttatcacagtggctccgtcaacgaccaaccattggcctttttacacagtgctctggacccgccagtctgcgagggctcaatgttgccgaggtgcagaaatccgaattctcttgtagcgggcaaggggaggccggtcgcgtccccacttgtactttgtctagtggatcatgtccagccatgtgcacatgtagcaacgggatcgtcgattgtcggggaaaaggactgactgctattccagctaatctgcccgagaccatgacggaaatccggcttgaactgaacggcatcaagagtatccctcctggggctttttcaccataccggaagctgcgaagaatagatctctcaaataaccagatcgctgagatcgcccctgacgcattccaaggactgagatctttgaattctttggtcctgtacggaaataaaattaccgacttgcctagaggggtttttggtggcctttatacactgcaactgctgttacttaacgccaataagatcaattgtatacgcccagacgctttccaagacctgtag

SEQ ID NO: 14745 - RNA, 558 nt, synthetic construct
  misc_feature 1..558: note = source = /note="Description of Artificial Sequence: Synthetic coding sequence"
  source 1..558: mol_type = other RNA
atgcctggttggcttacacttcctaccctatgccgctttctcttgtgggcttttacaatcttccacaaagcacaaggagacccagcatcccaccccggccctcactacctcctcccaccaatccacgaggttatacattcgcacaggggagcaacagccaccttaccatgcgtgttggggacgacaccaccaagttacaaggttagatggagcaaagtcgaacctggggaacttagggagacactgatcctcattaccaacggcttgcacgccagaggctatggaccattaggcgggagagcaagaatgaggcgtggtcaccgtcttgacgcgtctctagtgattgccggggtccggctcgaagacgagggaagatatcgctgtgaactgataaacggtatcgaggatgaatcggtggccctgaccctcagtctcgaaggagttgtgttcccctatcaaccgtcaagaggcagataccagttcaattactacgaagcgaagcaggcgtgcgaagagcaagatggtcgtctggcaacatattctcaactgtatcagtag

SEQ ID NO: 14746 - RNA, 375 nt, synthetic construct
  misc_feature 1..375: note = source = /note="Description of Artificial Sequence: Synthetic coding sequence"
  source 1..375: mol_type = other RNA
atgttaatgctgttcgttttcggcgttcttcttcacgaagtgtccctaagcggtcagaatgaggccccaccaaatacacacagcatccctggggaaccactctataattatgccagcattagactcccagaagaacacatcccttttttcctccacaacaatagacacatcgcaactgtctgtcggaaggacagtctttgtccttacaagaaacatctcgagaagctgaagtactgttggggctatgaaaaatcttgtaagcctgagttccgttttggctacccggtatgttcctacgtagacatgggatggactgacactcttgaaagcgctgaagacatcttttggaagcaggccgattttggatatgcatag

SEQ ID NO: 14747 - RNA, 5859 nt, synthetic construct
  misc_feature 1..5859: note = source = /note="Description of Artificial Sequence: Synthetic coding sequence"
  source 1..5859: mol_type = other RNA
atgcctgctcttggacctgccctgctacaggccttgtgggcaggctgggtacttacactgcagcccctcccccctacggcgttcactcctaatggaacatatcttcagcatctcgcacgggacccaacaagtggtacattgtatctaggagccaccaattttcttttccaacttagccccggccttcagctggaagctaccgtctctactggcccagttcttgactctcgggactgtttgcctcctgtcatgcctgacgagtgccctcaggcccagcccactaacaaccctaatcagcttctgctggtctcgcccggcgccctcgttgtgtgtggatcagttcatcagggtgtttgtgagcaacggcgactgggacaattggaacagctccttctgcgcccggaacgccctggagacacacaatatgtcgcagcgaatgatcccgccgtctcgaccgttggcctagttgctcagggactggcgggggaaccattgttgttcgttggtcgcggctatacttctcgaggggtcggcggaggtatccctccaatcactaccagagcattgtggccacctgatccccaagcggccttctcttatgaagagacagctaaacttgctgttggccggctgtcagagtacagccatcacttcgttagtgcttttgctcgcggagcttccgcctacttcctgttcctgcgccgagatctgcaggcccaatcccgtgcgtttagagcatacgtatcaagagtctgcctccgcgaccaacattactattcatacgtagagctaccactcgcttgcgagggagggcgttatgggctcatccaagccgctgctgtggccacatcacgagaggttgcccatggggaagtgctgttcgcagccttcagtagtgcagcccccccaactgtgggtaggccaccttccgccgcagctggcgcttccggagctagcgccctctgtgctttcccactagacgaggttgatcgacttgccaatagaactcgcgacgcctgctacacaagagaagggagagctgaggatggaactgaagtagcttatatcgaatacgacgtaaactctgattgtgctcagttgcccgtggacacactggacgcctatccatgtggatccgatcatacaccgtctcctatggcgtcacgcgtgcctttagaagccaccccgatcttagagtggcccggcatccagctgactgctgtcgccgtgactatggaagacggccacaccattgcatttttgggagatagtcagggccaacttcaccgcgtttacctaggtcccggcagtgatgggcatccatattcaacccagtccattcagcagggctcagctgtgtccagggacttaacttttgatgggacatttgagcatctgtacgtcatgactcaatccaccctgctcaaagtgcctgttgcatcatgcgctcagcaccttgattgcgcttcatgtttagcacatcgggatccttactgcggatggtgcgtgctcctgggacgctgctcaaggagaagcgagtgctccagaggacaaggacctgagcagtggttgtggtccttccaacccgaacttggttgtctccaggtcgcagccatgtcccctgcaaatatctcaagggaagagactagggaggtgttcctaagcgtcccagacctccctccattatggcctggcgagtcatactcttgccatttcggcgaacaccagtcccccgccttgcttacgggctccggcgtcatgtgtcccagccctgacccatctgaggctcccgttctaccccgtggtgcagactatgtctcagtatctgtggaactccggtttggggctgtggttattgcaaagacttccctctcgttttatgattgtgttgccgtcactgaactccgtccctctgcccagtgccaggcctgcgtatcgagtcgctgggggtgtaattggtgcgtctggcagcatctgtgtacacacaaggcctcctgcgatgcgggacccatggtagccagtcatcaaagtcccctggttagcccagatccaccggcacggggtgacggtgattcagccgaattagaaggaccccctgcccctctgatcctcccttctagccttgactaccagtatgacactcctggcctttgggagctcgaagaagccacattgggtgcttcttcctgtccatgcgttgaaagtgtccaaggaagtactttgatgcccgtgcacgtggaaagagagattagactattgggcagaaatctccatcttttccaggacggccccggagataacgagtgtgtgatggagctagaaggacttgaggtcgtcgtggaggcaagagtagaatgtgagccaccacctgacacacagtgccacgtgacatgtcaacagcaccagttgtcctacgaagccctccagccagaacttcgtgttggcttgttcctacgccgggcaggaagactgcgagtggattctgctgagggactgcatgtggttctttacgactgtagcgtgggccacggcgattgttcacgatgtcaaaccgctatgccgcaatatgggtgcgtatggtgtgaaggcgaacgccctagatgcgttaccagggaagcttgcggggaggccgaagctgtggcaacccaatgccccgctcccttgatccacagcgtcgagccattaacaggtcctgtggacggcggcacaagggttacgattaggggaagcaacctgggtcagcacgtgcaggatgtgttaggtatggtgacggtcgcaggggtaccttgcgcagtagacgcacaagaatatgaggtctctagctctctagtctgcatcacaggggccagtggagaagaggtggcaggtgctactgcggtagaggtaccaggtagaggacgaggggtcagtgaacacgattttgcttatcaggatcccaaggtccacagcattttccccgcccgggggccaagagcaggcgggacaaggctgaccttgaatggatccaaactgttaaccgggagattagaagatattcgagtagtggtcggagatcaaccctgccatctgttacctgagcagcaaagcgagcagctgaggtgtgaaacaagcccccgccccacaccggccactctcccagttgccgtttggttcggtgcaacggagcggcggctgcagcgaggccagttcaaatacactctggacccaaatattaccagtgcgggccctacaaagagttttttaagtgggggaagagaaatctgcgttcgaggtcaaaatcttgatgtggtgcagaccccccgaattcgtgtgacagttgtctctaggatgctccagccctcacagggcctcggaaggaggagaagagtcgtgcctgagactgcctgctcccttggaccttcttgtagctcccaacagttcgaggaaccctgccacgtgaacagctcacagttaataacctgccgtacgcccgcattgcccgggcttcccgaagacccctgggtgagagtggagtttattctggacaatctcgtgtttgattttgccaccttgaacccaacacccttcagttacgaggctgatcctacactgcagccactaaatcctgaagaccccaccatgccttttagacataaaccaggttctgttttcagcgttgagggggagaatcttgacctcgctatgagtaaggaagaagtagtcgccatgattggagacggcccctgtgtggtgaaaacccttacccggcaccacttgtactgtgaaccacctgtggaacagcccctgccccgtcaccatgcactgagagaggcaccagattctctgcccgagttcactgtgcagatgggtaacttgcgattttccctcggacatgtgcaatacgatggcgagagcccaggagccttcccagtcgccgctcaggtaggcctgggagttggaacaagcttactggcactgggcgttataattattgttcttatgtataggagaaagtccaaacaggctttgagggattacaagaaagtccaaattcagttggaaaacctggagtcaagtgtgcgtgaccgatgcaagaaggagtttaccgacctcatgacagagatgacagatctgacttccgatctactaggctcaggtatcccgtttcttgactataaagtttatgcggagaggatcttttttccgggccatcgcgaaagtccattacaccgtgatctaggagtccccgagtctagacggccgacagtggaacaaggcctgggccagctatcaaatctgttgaactcaaagctctttctgaccaagtttatccacacccttgagtctcagcgcaccttttccgcccgtgatcgcgcctatgtggcatcccttcttacggtcgcccttcacggcaaactggaatatttcactgatatattacggacccttctctctgatcttgtcgcgcagtatgtagcaaaaaacccaaaactcatgttacgtcgaaccgaaacagtggtagagaaactactgacaaattggatgagtatttgtctatacacctttgtaagggattccgttggagagcctctatatatgttgttccggggaatcaagcatcaggtggataagggcccagttgactcagttactggaaaagcgaagtacactctaaacgacaaccggctgcttcgagaagatgtcgagtataggcccctcaccttgaacgcactactggccgtgggccctggagcgggtgaagcgcagggggtgcccgtcaaagtcctcgactgtgatacgattagtcaggctaaagaaaaaatgctcgaccaattgtacaaaggggtgcctctcactcagcgcccagatccaagaactctagacgtggagtggagaagtggcgttgctggacacttaattctctctgacgaggatgtcacaagtgaggtccagggcctgtggcgccgcctgaataccctacagcactataaggttcccgatggcgcgactgtagccctagtgccatgccttaccaaacacgtattgcgggagaatcaggattacgtacccggcgaacgaacccccatgctcgaggacgtggatgaagggggaatcagaccgtggcatctggtgaaacctagcgacgagcccgaaccccctaggcccagacgcggaagccttcgcgggggagaaagagagagagccaaagctatcccagaaatctacttaactagacttctgagcatgaaaggaactcttcagaaattcgtggacgatctctttcaagtgatactgtcaacctctcgacccgtacccctggctgttaagtatttcttcgacttactcgatgaacaggcccaacaacatggaatctccgaccaggacaccattcacatttggaagaccaattccctaccattgaggttctggatcaatattattaagaacccacagttcgtattcgatgtccagacttccgacaacatggacgccgtccttctagtcattgcacagacattcatggatgcctgcaccttagctgatcacaaactaggacgagatagcccgatcaataaactgctctatgcccgcgatatcccaaggtacaaacggatggtggagcgctactatgccgacattcgccaaacggtaccggcctcagatcaagagatgaatagtgtcctcgccgaattgtcctggaactacagtggagacctgggcgcgagagttgccctgcatgaattatataagtatattaataagtattatgaccagattattacagccttggaggaggacggaacagcacaaaaaatgcagctgggatacagattgcagcagattgcggcagccgtggagaataaagtgacagacttatag

SEQ ID NO: 14748 - RNA, 612 nt, synthetic construct
  misc_feature 1..612: note = source = /note="Description of Artificial Sequence: Synthetic coding sequence"
  source 1..612: mol_type = other RNA
atgcgcactgtagtgttaaccatgaaggcaagcgtaatcgaaatgtttctggttctccttgtgaccggggtgcatagcaataaagagactgccaagaaaatcaaaaggcctaagtttactgtgccacaaattaattgcgacgttaaggccggtaagattattgaccccgaattcattgtgaaatgtccagcaggctgccaagacccgaaataccatgtgtatggtaccgatgtctatgctagctactcaagtgtgtgtggagctgccgttcattccggcgttttagacaatagcggcgggaagattctggttcggaaagtagccggtcaaagtggatacaaaggatcttattcaaatggtgtgcagtctctgagcctgccaaggtggcgggaatcatttatcgtcctggaaagtaagcctaaaaaaggagttacatacccgagtgctctaacctatagctcttcaaagagtcctgcagcacaagccggcaagtgtagccgggtcattgagtctaaaccctccgagagcatgaacacgcgcagagtgctgggagatagtggagaaattaacattctgactggccaagcgccactggccttagccattttctag

SEQ ID NO: 14749 - RNA, 2511 nt, synthetic construct
  misc_feature 1..2511: note = source = /note="Description of Artificial Sequence: Synthetic coding sequence"
  source 1..2511: mol_type = other RNA
atggaaactcaagaactccgcggtgctttggctttactgttgctgtgcttcttcacatctgccagtcaggaccttcaagtgatagacttacttactgttggtgaatcaaggcagatggtggcagtcgctgaaaaaattaggacagcactgctaactgccggggatatctacctgctttccacctttagattgccccccaaacagggcggagtgctgttcggcttatatagtcgtcaggataatacacgttggttggaagcctcagtcgtcgggaaaattaataaagtgacaaacgccctgcatagtatcctgggagaacaaacgaaagcattagttactcagttgacactgttcaaccagattctcgtcgagttacgggatgacatcagggatcaagttaaggagatgagtcttatccgaaatacaattatggagtgtcaagtctgtggctttcatgagcagcgaagtcattgcagccccaacccttgtttcaggggagtggattgcatggaagtatatgaatatcctggctatagatgcggtccctgtccacccggtctacaaggtaatgggacacattgctctgatataaacgagtgtgctcacgcagatccatgcttcccaggctccagctgcataaacacaatgcctggttttcactgtgaagcctgtcctcgaggatacaaaggtactcaggtgtcaggagtgggaattgactatgcccgcgcaagtaagcaagtatgcaatgatattgacgaatgcaatgacggtaataatggcggttgtgaccccaactctatctgtacaaacactgtcgggtcgtttaagtgcggaccatgcaggctcggctttttaggcaatcaaagccagggctgccttccggctagaacttgccatagccccgcccactcgccctgtcatattcatgcacactgtttgttcgagagaaatggcgctgtgtcatgtcagtgtaatgttggctgggcaggcaatgggaatgtgtgcggtacagacaccgacatcgatggctatccagatcaggccctgccttgtatggacaataacaagcactgcaagcaggataattgtctcctcacacccaactcaggccaagaggatgcagataacgacggagtaggtgaccagtgcgacgacgacgccgatggcgacggaattaagaatgtggaagataactgccggttatttccaaataaagaccagcagaattccgatactgatagcttcggcgacgcctgtgacaactgtcccaatgtacccaacaatgaccagaaggacacagacggtaacggagaaggggacgcttgtgacaatgacgtggacggtgacgggatccccaatggcttagacaactgcccaaaggtacccaaccccctacaaacggaccgagatgaagacggggtaggcgatgcatgcgattcctgcccagaaatgtccaacccaacacagactgatgccgactccgatttggtgggcgacgtgtgtgacacaaacgaagattccgacggtgatgggcaccaggataccaaagataattgtccccaacttcccaatagctcgcagttggatagcgacaatgacggtttgggcgacgaatgcgatggcgatgacgacaacgatggaattccagactatgtacctccaggaccagacaactgccgccttgtcccaaatccaaatcagaaggatagcgacggtaacggcgtgggagatgtttgtgaagacgactttgacaacgacgctgtagtagaccctttggatgtatgccccgaatctgccgaagtgacgttgacggactttagagcataccagactgtggttttggatcccgaaggagatgcccagatcgatccaaattgggtggttcttaatcaaggaatggaaatagtacagaccatgaatagtgatcccggcctggcggtgggctatacagctttcaatggcgttgacttcgagggtaccttccacgtgaacacagtgaccgatgacgactacgcaggatttctctttagctatcaggactcaggacgattttatgtcgtgatgtggaaacagacagagcagacctactggcaggcaacaccgttccgtgcggttgctcaacccgggctgcaactgaaagctgtcacttctgtctcaggaccgggtgaacatcttcgaaacgcattatggcataccggacacactccagaccaggtgagacttctgtggactgatccccgaaatgtgggctggagggataagacttcctaccgatggcagcttcttcatcgaccacaagtgggatatatccgggtcaagctttacgaagggcctcagttggtagccgattctggtgtaattattgatacctcaatgaggggaggcaggttaggagtcttttgttttagtcaggagaacataatctggagcaacttgcaatatagatgcaacgacacagtgcccgaggatttcgaaccgtttagaagacaattgctacaaggacgcgtctag

SEQ ID NO: 14750 - RNA, 1311 nt, synthetic construct
  misc_feature 1..1311: note = source = /note="Description of Artificial Sequence: Synthetic coding sequence"
  source 1..1311: mol_type = other RNA
atgtggagatgccccctcggtctcctactcttactgcctctagccggccacctcgcattgggagcccagcagggccgcggaagaagggagttagcccccggactgcatctgcggggtatcagagatgccggcgggcgctactgccaagaacaggacttgtgttgccggggccgggccgatgactgtgcactgccctatctgggagccatttgctattgtgacttattttgtaaccggacggtgagtgattgttgtcctgacttttgggacttctgtctaggtgtacctccacctttcccaccaatccagggctgtatgcatggtggccggatctaccctgtgcttggcacttactgggataactgcaatagatgctggcaagccggaaaccactctgcattttggggaatgactctggacgaagggatccgatatagattgggcacaatcaggccctcatcctccgtgatgaacatgcacgaaatttatactgtcctgaatcccggtgaagtgctgcctaccgcgttcgaagcgtctgaaaaatggcctaatcttattcacgagcctctcgatcagggaaactgcgccgggtcatgggctttttctactgccgccgtcgcttctgatcgggtttccatccatagtctaggccacatgacccctgtgttgagcccacagaatttactctcatgcgatactcaccagcagcagggatgtaggggcggcaggctggatggcgcttggtggtttttgagaaggaggggcgtcgtgtctgaccactgttaccccttttcagggcgggaaagagatgaggccggccctgctcctccctgcatgatgcatagccgggcaatgggcagaggtaaaagacaggccaccgcgcattgcccaaattcatacgtaaacaataatgatatttaccaggtgacccccgtctaccgactgggttctaatgacaaagagattatgaaggaactgatggagaacggccctgtccaagcacttatggaggtccacgaggatttctttctgtacaagggaggcatttatagtcatacacccgtctcactcggccgcccagaacgatatcgccgacacggaacccacagcgtcaaaataaccggctggggagaggaaacattgccagatggccggactctgaagtactggaccgcagcaaattcttggggtcccgcgtggggagagaggggacattttcgcatagttaggggcgtcaatgagtgcgatatcgaatcttttgtgttgggcgtttggggaagggtgggaatggaagatatgggtcatcactag

SEQ ID NO: 14751 - RNA, 942 nt, synthetic construct
  misc_feature 1..942: note = source = /note="Description of Artificial Sequence: Synthetic coding sequence"
  source 1..942: mol_type = other RNA
atgtctgatctgttactgctgggacttattgggggcctgactctcctgctgctgctgacattattggcatttgcaggctattctgggcttctcgctggggtagaagtgtctgctggtagcccgccgattaggaacgtgaccgttgcatacaaatttcacatgggtctttatggtgagacaggacggctctttacggaatcttgcagtattagtccaaaactccgctctatcgctgtctattatgataatccccacatggttccccccgataaatgcaggtgcgccgtgggaagtatcctgtctgaaggcgaagaatccccctctcctgagcttattgacttgtatcaaaaattcggctttaaagtcttctccttcccagctcctagccatgttgttaccgctacctttccgtataccaccatcctcagcatctggttggccactaggcgtgtgcatcctgcattggatacatatattaaggaacgaaaattgtgtgcctacccacggctggagatctatcaagaagaccagattcattttatgtgcccgctagctagacagggcgacttctacgtccctgaaatgaaggagacagagtggaagtggcggggattggtagaggcaatagatacacaggttgacgggaccggagccgacactatgtccgacaccagcagcgtcagtctagaggtcagcccaggcagcagggagacgtcagcagcaactttgagccccggggcatcatcaagagggtgggacgatggagacacacgaagtgaacatagctacagcgagtccggcgccagtggtagttccttcgaggagctggacttagaaggtgaggggcccctgggggaaagccggctcgacccaggcacagagcctctcggcacaactaagtggttatgggaaccaaccgctccagagaaagggaaagagtag

SEQ ID NO: 14752 - RNA, 213 nt, synthetic construct; identical to SEQ ID NO: 13113
  misc_feature 1..213: note = source = /note="Description of Artificial Sequence: Synthetic coding sequence"
  source 1..213: mol_type = other RNA

SEQ ID NO: 14753 - RNA, 642 nt, synthetic construct
  misc_feature 1..642: note = source = /note="Description of Artificial Sequence: Synthetic coding sequence"
  source 1..642: mol_type = other RNA
atggctcaactcttcctgcctctccttgcagccttggtgctggcccaagcaccagccgctctcgctgatgtgctggaaggcgactcaagtgaagaccgggcattccgcgtgagaatcgccggtgacgctcctctgcagggtgtgctagggggggcgttaacaattccctgccatgtgcactatcttagaccccctccttctcgccgagctgttcttggatcaccacgcgtgaaatggacatttctctcccgcggacgtgaggccgaggtgctggtggctagaggcgtgcgcgtgaaagtaaacgaagcgtatcgatttagagtggccttgcccgcttaccctgcaagtcttaccgatgtttcactggctttgtccgagctccggcccaatgactctggtatctaccggtgcgaggtacagcatggaattgacgatagcagcgatgccgtggaggtgaaagttaaaggggttgtgtttctctatcgcgaagggagtgctcggtacgcctttagtttttccggggcacaggaagcatgtgctagaattggcgctcatatcgccacaccagagcagctctacgcagcatacctgggcggatatgaacaatgcgacgctggctggctttctgatcaaaccgtttag

SEQ ID NO: 14754 - RNA, 237 nt, synthetic construct; identical to SEQ ID NO: 13115
  misc_feature 1..237: note = source = /note="Description of Artificial Sequence: Synthetic coding sequence"
  source 1..237: mol_type = other RNA

SEQ ID NO: 14755 - RNA, 651 nt, synthetic construct
  misc_feature 1..651: note = source = /note="Description of Artificial Sequence: Synthetic coding sequence"
  source 1..651: mol_type = other RNA
atgtccgatctgctccttttgggtctcatcgggggtctgacccttttattgctcctgaccttgctggccttcgcaggatattcaggcctgctcgctggagtagaagtatctgccggctctccaccaatccgcaatgttactgtcgcgtacaagttccacatgggcctgtatggggaaactgggagactgttcactgagtcatgctctataagcccaaaactgagatcaatagctgtatactatgataacccccacatggtgcctccagataaatgtaggtgtgccgtaggttcaattctgtccgaaggtgaggaatccccttccccggaattgattgatctttaccagaagttcggctttaaggtgttctcatttccagctcccagccacgtcgtgactgccacctttccttataccaccatcctgagtatttggctcgctacccgccgcgttcaccccgctcttgacacctatatcaaagaacgaaagctttgcgcctaccctcgcctggaaatctatcaggaggaccagatccacttcatgtgtccattagcgcgccagggtgacttttacgttcctgagatgaaagagacagaatggaagtggagagggctagttgaagcgatagatactcaggtagatggcacatag

SEQ ID NO: 14756 - RNA, 453 nt, synthetic construct
  misc_feature 1..453: note = source = /note="Description of Artificial Sequence: Synthetic coding sequence"
  source 1..453: mol_type = other RNA
atgcggtttatggcaggaccagctggttcccagagtcttggacctctgtgtttccattcttccccccaggctctgtataccgtgctcctcatagtgctcgttatgatgtcactcgtgtttggcaagtttgtgcccgtgaactgggaacccccccagcctctgccctttcctaagtatttacgctgctacagatgtttgttggaaaccaaagagctaggctgccttcttggatccgacatatgtttaacccctgccggcagcagctgcattacactacacaaaaaaaattcgtcaggatctgatgttatggtatccgactgcaggtctaaagaacaaatgagtgattgcagcaatacacgaacctctcctgtttcaggcttctggattttttcgcagtactgcttcctggatttttgtaatgatccccagaaccgaggattatatactccctag

SEQ ID NO: 14757 - RNA, 171 nt, synthetic construct; identical to SEQ ID NO: 13118
  misc_feature 1..171: note = source = /note="Description of Artificial Sequence: Synthetic coding sequence"
  source 1..171: mol_type = other RNA

SEQ ID NO: 14758 - RNA, 2346 nt, synthetic construct
  misc_feature 1..2346: note = source = /note="Description of Artificial Sequence: Synthetic coding sequence"
  source 1..2346: mol_type = other RNA
atggcagtcgccgaggtaagcagaacatgtctacttaccgtgcgcgtcctgcaggctcatagattgccttccaaagacctcgtgactccttcagattgctacgtcacattatggctacctaccgcttgctcgcataggctccaaacaagaacagtcaaaaattcctcctctcctgtgtggaatcagagttttcattttcgtattcacagacagctcaagaatgttatggaactaaaggtattcgaccaagacttggttaccggggacgaccccgtactgtccgtgctctttgatgcaggcacccttagagccggcgaatttcggagagagagcttttcactatccccccagggcgagggtaggctagaagtcgaattcagattgcaatctttggctgatcgtggcgaatggctggtgagcaatggggttctcgtagcaagagaacttagttgtctccacgtgcagttagaagaaactggggaccaaaagtctagtgaacacagagtgcagctggttgtgccaggtagctgtgagggcccacaggaggcgagtgttggtacaggtacttttcgctttcattgccccgcatgttgggaacaagaattaagcattcgacttcaggatgcacccgaggagcaactgaaagccccattatctgcgctgccaagcggtcaagtcgtgcgcctggtctttccgactagccaggagcccctgatgcgggtggagctgaaaaaggaggccggattgcgagaacttgcagtgagacttggattcggcccatgtgccgaagagcaagcattcctcagccgtcgaaaacaggttgtggcagcggctttaaggcaggccctacagctggatggagatttacaagaagacgagatcccagtggtggccatcatggctacaggcggcggaataagagccatgacaagtctctacgggcagctcgcaggcttgaaggaactcggtttgctcgactgtgtctcctacatcacgggcgcctcaggctcaacttgggctttagcgaacctgtatgaagacccagagtggtcgcagaaggatctggccggccctactgaactgttaaaaacacaagtgactaaaaataaactcggagtattagccccttctcagctgcagagataccgacaggaactggccgagcgggccaggttaggctacccatcatgctttaccaacctgtgggctctgattaatgaagctttgctgcacgatgagccacacgaccacaaactgagtgaccaaagggaagccctatcacacggccaaaacccactaccaatttactgcgcgctcaacacaaagggacagtctttaacaacgtttgagttcggggagtggtgcgaattttcaccctacgaggtgggttttcctaagtatggagccttcattccttcggagttgtttggaagtgaattcttcatgggccagttaatgaaacgtctgccggaatctcggatctgctttctggaaggtatttggagcaatctttatgctgccaacctccaggactcactctattgggcctccgaaccctctcaattttgggatcgctgggtccggaaccaggctaatttggacaaggaacaggttcccctgttgaagatcgaagagccaccttctactgccggtcgcatagctgaattttttaccgacctccttacatggagacctctggcccaagctacacataactttctacgaggactgcacttccacaaagattactttcaacatccccatttcagcacctggaaagctacaacgctggatggtttacctaatcagttgacacctagcgaaccccatctgtgtttgctcgacgtcggatatttgattaatacctcctgcctccccctattgcagccaaccagagacgtcgaccttattctttccctcgattataaccttcacggcgcttttcagcagctgcagctgctcggaagattttgtcaagagcagggcatcccttttccccctatttctccctccccagaagagcagctccagccacgcgaatgccataccttcagtgatcctacatgtccaggtgcaccggccgttctgcattttccattggtgtcagatagtttcagagagtattccgcacccggtgtcagacggacccctgaggaagccgcagcgggagaagtgaatctgagctctagtgattccccgtaccattataccaaagtgacatacagccaggaggatgtagataaacttctgcacctgacccattacaatgtttgtaacaaccaggagcaactcctagaagccttgaggcaagctgtacaacgacgcagacaaaggagaccccactag

SEQ ID NO: 14759 - RNA, 219 nt, synthetic construct; identical to SEQ ID NO: 13120
  misc_feature 1..219: note = source = /note="Description of Artificial Sequence: Synthetic coding sequence"
  source 1..219: mol_type = other RNA

SEQ ID NO: 14760 - RNA, 243 nt, synthetic construct; identical to SEQ ID NO: 13121
  misc_feature 1..243: note = source = /note="Description of Artificial Sequence: Synthetic coding sequence"
  source 1..243: mol_type = other RNA

SEQ ID NO: 14761 - RNA, 861 nt, synthetic construct
  misc_feature 1..861: note = source = /note="Description of Artificial Sequence: Synthetic coding sequence"
  source 1..861: mol_type = other RNA
atggggcccgaagcactgagctcattactccttttactgctcgtagcctccggtgatgcagacatgaagggccacttcgatccagccaaatgtagatacgccctgggaatgcaggatagaacaatccctgacagcgacattagcgcctcaagttcttggtccgattcgactgcagctcggcattctcgcctggaatccagtgacggggacggagcgtggtgcccagctggttcagtctttcctaaggaagaggagtatctccaagttgacctgcagagactgcacctcgtggcactggtggggacacaggggagacacgctggaggactaggaaaggagttttcgcggtcttatcgcttgcgatattctcgggatgggcggcgctggatgggatggaaagatcgatgggggcaagaggtgatcagcggaaatgaggatccagaaggcgttgtactcaaggacctgggaccccctatggtggcaagactggtcagattctatcctcgcgctgaccgcgttatgagcgtttgcctcagagtggagttgtacgggtgcctttggagggatggactattaagttatactgcccctgtgggacaaacaatgtatctgagtgaggcagtatatctcaatgactctacctacgacggtcatactgtgggtggcctgcaatatggtggtttaggtcagctcgccgatggtgtggtaggcctggatgactttcgcaaatcccaggagttaagggtgtggccaggctatgattacgtcggatggtcaaaccactctttcagcagcggatatgtggaaatggaatttgaatttgacagacttagggctttccaggcgatgcaggtgcactag

SEQ ID NO: 14762 - RNA, 858 nt, synthetic construct
  misc_feature 1..858: note = source = /note="Description of Artificial Sequence: Synthetic coding sequence"
  source 1..858: mol_type = other RNA
atgagaggacaagggcggaaagagtctctcagcgattctcgggaccttgacggctcttacgatcagctcactggacatccgcctggccccaccaaaaaagcccttaagcagaggttcctcaaactgttgccttgctgcggtccgcaagctctccctagcgtgtctgagattggtcgcgtgtttaggtttttgggcgatagcagtctgccatcagccctcgcggcccccgcaagcctgcgtccacataggccccgtctgctagatcctgactctgttgatgatgaatttgagttaagcaccgtctgtcatcgccctgaaggcctcgaacaactccaggagcagacaaagtttacccggaaagagctgcaagtactttatcggggattcaaaaacgaatgcccctcaggaatcgtcaacgaagaaaactttaaacaaatctacagtcaattcttcccccagggagacagttctacctacgcaaccttcctcttcaatgcattcgacacaaatcacgatgggagtgtaagtttcgaagattttgttgccgggttaagcgttatattgagaggtaccgtggatgataggttgaattgggcctttaacctgtatgacttgaataaagatggatgtataacaaaagaagaaatgttggatatcatgaagagcatttacgacatgatgggaaaatacacctacccagctctgagggaggaagccccaagagaacacgttgagtcattctttcagaagatggatagaaacaaggatggagttgtgacgatcgaggaatttatagagtcatgccagaaggatgaaaatatcatgcggtcaatgcaactgttcgacaatgtgatttag

SEQ ID NO: 14763 - RNA, 1311 nt, synthetic construct
  misc_feature 1..1311: note = source = /note="Description of Artificial Sequence: Synthetic coding sequence"
  source 1..1311: mol_type = other RNA
atgcagggcacccccggcggtggaacaaggccagggccaagcccagtggataggcgcaccttgctcgtgttctccttcatcttggcagctgccctgggacaaatgaacttcactggagaccaggtcctgagagttttggcaaaagatgaaaaacagttgagtctccttggagacctggagggactgaagccccaaaaagttgatttctggcgaggacccgctagaccatctttgcctgtggacatgagggtcccgttctccgaactcaaagatattaaagcctacctcgagtcgcacggccttgcctactcaattatgattaaagatatacaggtgttgctggatgaagaacgacaggctatggcaaagtcacgacgattagaacgctcaacgaacagtttctcatactcctcctatcacacgcttgaggaaatctactcctggatagacaactttgttatggagcactctgatatagtttcgaagatccagattggtaattccttcgagaaccaaagcattctcgtactgaaattctcaacaggaggatctaggcaccccgcaatctggatcgacaccggaatccactcccgggagtggatcacccacgctacgggcatttggacagccaataagattgtatctgattacggtaaagaccgcgtactgactgacattcttaacgcaatggacattttcatcgaactggtgactaaccccgacggattcgcctttacccactcaatgaatcgtctctggcgcaaaaacaagagcatacgccctggcattttttgtatcggcgttgatctcaacaggaattggaagtctggcttcggtggcaacggctcaaactctaatccttgttcagagacatatcacggaccttcccctcaatcagaaccagaggtcgccgctatagtcaattttattacagcacacgggaattttaaagccttgatttccatccattcttactcacagatgctcatgtacccatatggccggctactggagccagtctccaatcagcgagagctttatgacctcgccaaagatgcagtagaagctctctataaggttcacggcattgaatacattttcggatctatttccacaacactgtacgtggctagcggtattacagtggattgggcatacgacagtgggattaagtacgcattctccttcgaactgagggatacagggcagtacggattcctcttaccagcgacacagattataccaacagctcaagagacttggatggctttaagaacaattatggaacacactctgaatcatccttactag

SEQ ID NO: 14764 - RNA, 1218 nt, synthetic construct
  misc_feature 1..1218: note = source = /note="Description of Artificial Sequence: Synthetic coding sequence"
  source 1..1218: mol_type = other RNA
atggataccatcttcctgtggagcctcctgttgctctttttcggatcacaggcgtcccgctgcagcgcccagaaaaacaccgaatttgccgtcgatctctatcaggaagtgtctctcagccataaggataacatcatattttcacctctaggcatcacgctagtgctggaaatggtgcaactcggagctaagggaaaggctcagcagcagattagacagacactgaagcagcaggaaacatccgccggcgaggaatttttcgtcctgaaatcttttttctcggccatttccgaaaaaaaacaagagtttaccttcaatctcgcaaacgccctgtacctccaggaaggttttacagttaaggagcaatatctgcatggtaacaaggagtttttccagagtgcaataaaactagttgattttcaggacgcgaaggcctgtgccgaaatgatctcaacgtgggtcgagagaaaaactgacggcaaaatcaaggacatgtttagtggtgaagaatttggtcccctcactcgcttggtgttggtcaatgccatctacttcaagggcgattggaagcagaagtttagaaaagaggatacacagctgatcaatttcactaaaaaaaatggtagcaccgtaaagatccccatgatgaaagcccttcttagaacaaaatacggttatttcagtgagtccagcttaaactaccaggtgctggagcttagttacaaaggcgatgaattcagcttgattattatactgcccgcagaagggatggacattgaggaggtggagaagctaattaccgctcagcaaatcttgaagtggctgtccgaaatgcaggaggaagaggtagagatttccctcccgcgatttaaggtggaacagaaggtggactttaaagacgtattgtacagtttgaatatcaccgaaatattctcaggaggatgtgatctcagcggcatcaccgatagttcagaagtgtatgtatcccaggtcacgcagaaggtgttctttgaaataaacgaagacgggtctgaggccgcaacctctactggcatccacatccccgtaatcatgtcactggcacaatctcagttcatcgctaatcatccttttctgttcataatgaagcacaacccaaccgaatccatcctttttatggggagagtcacaaaccccgacactcaggagattaagggcagagatctggatagtctgtag

SEQ ID NO: 14765 - RNA, 300 nt, synthetic construct; identical to SEQ ID NO: 13126
  misc_feature 1..300: note = source = /note="Description of Artificial Sequence: Synthetic coding sequence"
  source 1..300: mol_type = other RNA

SEQ ID NO: 14766 - RNA, 471 nt, synthetic construct
  misc_feature 1..471: note = source = /note="Description of Artificial Sequence: Synthetic coding sequence"
  source 1..471: mol_type = other RNA
atgttactgctacttctcctggctcctctgtttttacgaccccctggcgccggtggagctcaaacccctaatgcaacctccgagggatgtcagatcattcatcccccttgggagggcggaattaggtatcgcggcttgacccgtgaccaggtgaaagccattaattttctgcctgtggattacgaaattgagtatgtttgccggggagagcgcgaagtcgtcgggcccaaggtaagaaagtgtctagccaatggatcctggactgatatggacactccttcaagatgtgtgaggatctgcagtaaatcctacttgactttagaaaacggcaaagtttttcttactggcggcgacctcccagcactagatggcgctcgggtagacttcagatgtgaccctgattttcatcttgtgggctcatccaggagcatatgttcccagggccagtggagcacgcccaaaccgcactag

SEQ ID NO: 14767 - RNA, 249 nt, synthetic construct; identical to SEQ ID NO: 13128
  misc_feature 1..249: note = source = /note="Description of Artificial Sequence: Synthetic coding sequence"
  source 1..249: mol_type = other RNA

SEQ ID NO: 14768 - RNA, 372 nt, synthetic construct
  misc_feature 1..372: note = source = /note="Description of Artificial Sequence: Synthetic coding sequence"
  source 1..372: mol_type = other RNA
atgcaagggacccccggaggcgggacccggccaggcccatcccccgtggacaggcggacgctgctggtgttctcctttattttagcagctgctttggggcaaatgaactttactggcgatcaagttcttcgggtccttgcaaaagacgaaaagcagctttctcttctcggcgacctagaaggccttaagccccaaaaagtagatttctggcggggcccagcccgacccagcctgccagttgacatgcgcgttcctttctccgagctgaaggacattaaagcctaccttgagtcgcatggcttagcttattcgataatgattaaagacatccaagtgctgttggacgaggaaaggcaggcaatggcaaaatag

SEQ ID NO: 14769 - RNA, 840 nt, synthetic construct
  misc_feature 1..840: note = source = /note="Description of Artificial Sequence: Synthetic coding sequence"
  source 1..840: mol_type = other RNA
atgggaagggtcttcctaacaggagaaaaagctaactcaatactgaaacggtatccccgggccaacggctttttcgaggagattaggcaaggcaatatagagagggagtgcaaggaagaattctgtactttcgaagaagctcgcgaagctttcgaaaacaacgagaagacaattaccggcgttatactccttgctgtgggagtttggggaaagctgactttgggaacatacatttcactgatcgccgaaaactcgaccaacgccccttacgtcctcattggtaccggaaccaccatcgttgtcttcggactcttcggctgttttgcaacatgtcggggcagtccttggatgttgaagctgtacgccatgtttctatcgctcgttttcttagccgaacttgttgcaggtattagcggatttgtattccggcacgaaattaaggatacttttctgagaacatacacagatgccatgcagacatataatggaaacgatgaaagatcccgcgccgttgaccatgtgcaaaggtccctgtcatgttgtggcgtgcaaaattatacaaattggagtacaagcccttatttcctcgaacacggtattcctccaagttgctgcatgaacgaaacggactgcaatccccaggacttacataatctgaccgttgccgccactaaagttaatcagaagggatgttatgatctcgtcaccagttttatggagacaaacatggggattattgccggggttgcctttggcatcgcattctcacagttgatcgggatgctacttgcatgttgtttatctagatttattaccgccaatcagtacgagatggtgtag

SEQ ID NO: 14770 - RNA, 564 nt, synthetic construct
  misc_feature 1..564: note = source = /note="Description of Artificial Sequence: Synthetic coding sequence"
  source 1..564: mol_type = other RNA
atgtggtgtgccagccctgtggcagtcgtcgctttttgcgcaggtttgttggtatcacaccctgtgttgacccaggggcaggaagccggcgggcgccccggggccgattgtgaggtgtgtaaagagtttctgaatcgattctataaatccttgattgataggggcgttaatttttcactcgatacaattgaaaaggagttgatctcattttgtctggataccaaaggcaaggaaaaccgcctgtgctactaccttggtgccacgaaagatgccgcaacaaagatactaagcgaagtgacaagacccatgagcgtccatatgcctgctatgaagatctgcgagaagctgaagaaactggatagtcagatctgtgagcttaagtacgaaaagacactggatctcgcatctgttgacctgagaaaaatgagagtagccgaactgaaacagatattgcacagctggggagaagaatgccgcgcttgcgctgagaagaccgactacgtaaatctcattcaggaactggcgcccaagtacgctgcaacccatcctaagaccgagctttag

SEQ ID NO: 14771 - RNA, 1311 nt, synthetic construct
  misc_feature 1..1311: note = source = /note="Description of Artificial Sequence: Synthetic coding sequence"
  source 1..1311: mol_type = other RNA
atgcagggcacgccaggcggcggaacccggccaggtcccagccctgtagaccgcagaacattgctcgtgttctcttttatacttgctgcagccctcggtcagatgaattttaccggcgaccaggtcctgcgcgtgttagccaaggatgagaaacaactcagcctcctgggtgatttagagggactgaagccccaaaaggtagatttttggcgcggaccggctagacccagcctccctgtggacatgagagtacccttctccgaactgaaagatatcaaagcttatctcgaatcccatggcttggcatatagtatcatgattaaggatatccaggtattactagacgaagagcgtcaggcgatggccaaatctagaagattggaacggtctaccaactccttttcatattcatcctatcacaccctagaggagatctatagctggattgataattttgtaatggaacattcggatatagtgagtaagatacagataggcaattcatttgaaaaccagagtatcctcgtccttaaatttagtaccggcggcagccgccatcccgctatttggatcgacaccgggattcattccagggagtggatcacccatgcgactggaatctggacagccaacaaaattgtgtccgattacggaaaagaccgagtgctgaccgacatcctgaacgcaatggacatttttattgagcttgtcactaaccctgatgggtttgccttcactcactccatgaatcgcttatggcgaaagaacaagagtatacgaccgggcatcttttgtattggagttgatttgaaccgaaactggaaatctgggtttggcgggaatggctctaactctaacccttgtagcgaaacatatcacggcccttctcctcaatccgagccggaggttgccgccatcgtaaacttcatcacagcacatggcaacttcaaagctcttatcagtatccactcctactcccagatgttaatgtatccttatggccgattgctagaacccgtgtctaatcagcgcgaactgtatgatctggcaaaagatgccgtggaagctctatacaaagtacatggaatagaatacatctttggaagcatctcgacaactctctacgtcgcttctggcataacagtggactgggcctatgacagtggcatcaaatacgcgttcagctttgaattaagagacaccggacaatatggattccttctccccgctacccaaattattcctaccgcgcaagaaacctggatggcacttagaactattatggagcataccctgaatcacccctattag

SEQ ID NO: 14772 - RNA, 450 nt, synthetic construct
  misc_feature 1..450: note = source = /note="Description of Artificial Sequence: Synthetic coding sequence"
  source 1..450: mol_type = other RNA
atgggtcgcgtgttcctcaccggcgagaaagctaattccatcctcaagagatatccgcgggcaaacgggtttttcgaagaaatcaggcaggggaatatagagagagaatgcaaagaggaattttgtaccttcgaagaagcaagagaggcattcgaaaacaatgagaagacaaaagagttttggtctacgtacaccaaggcccagcaaggagaatccaacaggggaagcgactggttccaattttatctcacctttccactgatttttggtctttttatcattttactcgtgattttcctgatctggagatgcttcctgcgaaataaaacccgaagacagactgttacagagggccacatcccattcccacaacatctgaacataatcaccccccctccaccccccgatgaagtgttcgattcctccggactcagtcctggctttctttag

SEQ ID NO: 14773 - RNA, 936 nt, synthetic construct
  misc_feature 1..936: note = source = /note="Description of Artificial Sequence: Synthetic coding sequence"
  source 1..936: mol_type = other RNA
atgctgtatcaaaccatcaattccctcaagactaaaaaccccaaattaaaaatcttactgagtatcgggggatacctattcggcagcaagggattccaccctatggtagactcatccacatctcgcctggagtttattaactcaatcatcctgttcttacgcaatcacaattttgacggactagatgtaagttggatttatccagaccagaaagagaacacacattttaccgtcctgatccacgaactcgccgaagcctttcagaaggacttcacgaaaagcacaaaggaaagactgctgttgactgcaggcgtgtcagcaggacgccagatgatcgataactcctatcaggtagaaaaactcgcaaaggaccttgatttcatcaaccttttaagttttgacttccacggaagttgggagaagccccttatcactggccacaacagccctcttagtaaaggctggcaggatcgcggcccctctagttattacaacgtcgaatacgcagtggggtattggatacataaaggaatgccctccgaaaaagtggtcatgggaattcccacttatggacactcctttacacttgcaagtgccgagacaaccgtcggcgcacccgcctccggaccgggcgcagcaggtccaatcacagaaagcagcggatttttagcgtactacgagatttgccagtttttgaagggcgccaagataacaagactccaggaccagcaagtgccgtatgcagtgaaaggtaaccagtgggtgggctatgacgatgtgaaaagcatggaaactaaggtgcagtttctgaagaatctgaatttggggggcgccatgatttggagtattgatatggacgacttcaccgggaaatcatgtaaccagggtccttaccctctggtgcaggcagtaaaacgatcactgggaagcctttag

SEQ ID NO: 14774 - RNA, 621 nt, synthetic construct
  misc_feature 1..621: note = source = /note="Description of Artificial Sequence: Synthetic coding sequence"
  source 1..621: mol_type = other RNA
atggataccatctttctgtggtccctgctattactgttttttggctctcaggctagccggtgttctgcacagaaaaacaccgagttcgccgttgacttataccaagaagttagcctttcgcataaagacaacataatcttctctccattgggcatcactctcgtcctggaaatggtccaacttggcgctaaagggaaagcacaacaacagatcagacagactctgaaacagcaggaaacgtccgctggagaagagttctttgtgcttaaaagttttttttcagccatctcggaaaaaaagcaggagtttacatttaatcttgcaaatgcactctacctgcaggaaggcttcactgtgaaagagcaatacctccatggtaataaagagttttttcagagcgctattaagctagtggattttcaggacgcgaaagcctgcgcagaaatgatttcgacatgggtggaaaggaagacagacggaaaaattaaggacatgttctctggcgaagagttcggccccctgactcggctggtgttagttaatgcgatatacttcaaaggagactggaaacaaaagtttagaaaggaagatactcagctgatcaacttcactaaaaaatag

SEQ ID NO: 14775 - RNA, 1218 nt, synthetic construct
  misc_feature 1..1218: note = source = /note="Description of Artificial Sequence: Synthetic coding sequence"
  source 1..1218: mol_type = other RNA
atggacactatcttcctctggtctctacttttgctattttttggctctcaagcaagccgatgctccgctcaaaagaataccgaattcgccgtggatctgtaccaggaggtcagtctctctcataaagacaacataatttttagccccctcggtatcacattagtgcttgagatggtccagctaggagcgaaaggcaaggcacaacagcagattcggcagacactgaagcaacaagaaactagcgcgggtgaggaattctttgtgctgaagagcttcttcagtgctatatctgaaaagaagcaggagttcacattcaatctagctaatgctttatatttacaggaaggcttcaccgtcaaggaacagtatctgcatgggaacaaggaattttttcagtctgctattaagctggtggattttcaggacgctaaggcatgcgctgagatgatcagtacttgggttgaacgcaaaacggacggcaagatcaaggacatgttttcaggtgaggagttcggccctttgacccggcttgtattggtgaatgcaatctatttcaaaggcgactggaaacagaaatttcgcaaggaagatacacagcttatcaactttacaaaaaaaaacggttctaccgttaaaatcccgatgatgaaagcattgctgcggaccaaatatggatacttttctgagtcatcactgaattatcaggtcttagagttgtcctacaaaggagatgaattctctcttattatcatcctgcccgctgaaggtatggacattgaagaagtggagaaattgattactgcccagcaaattcttaaatggctgtcagagatgcaggaagaagaagtggaaattagcctgccaagatttaaggttgagcagaaagtcgactttaaggacgtgctgtattccctcaatataacagagattttttctgggggctgcgacctgtcgggaatcacagatagctcggaggtatatgtatctcaagtgacacagaaagtgttttttgaaattaatgaagacggttccgaggccgctaccagcactggaatccacatccccgtcattatgagcctggcccagtcccaattcattgccaatcaccctttcctttttattatgaaacataatccaaccgaatctattctgtttatgggtagagtgacaaatcccgacactcaagagattaagggtagggatctagatagtctgtag

SEQ ID NO: 14776 - RNA, 399 nt, synthetic construct
  misc_feature 1..399: note = source = /note="Description of Artificial Sequence: Synthetic coding sequence"
  source 1..399: mol_type = other RNA
atgcttatcttctggacaattacactctttttgcttggagccgctaagggaaaagaagtctgttatgaagacctgggatgcttcagtgataccgaaccctggggaggcaccgcaattagaccccttaaaatattaccttggtctcctgaaaagattggcacccgattcttattgtatacgaacgaaaaccccaataacttccaaatcctgttgctgtccgatcctagtacaattgaagcctctaactttcagatggatcgaaaaactagattcattattcacgggtttatcgacaaaggtgatgaatcttgggttactgacatgtgcaagaaactgttcgaggtggaagaggtgaactgtatttgcgtagattggaagaagggaagtcaagctacatag

SEQ ID NO: 14777 - RNA, 606 nt, synthetic construct
  misc_feature 1..606: note = source = /note="Description of Artificial Sequence: Synthetic coding sequence"
  source 1..606: mol_type = other RNA
atgaaggttcatatgttagtcggggtcttagtcatggtcggctttacagtgggtaaagtacctgtgccagacattcgtacctgccatttttgcctcgttgaggatcctagtgtgggctgcatatctggttcagagaagtgtaccatctcaagttcctcattatgtatggtgatcacaatctactacgatgtaaaagtccggttcatcgtgcgtgggtgcggacaatatatttcatatcgctgccaggagaaacggaatacctatttcgctgaatactggtaccaagcgcagtgctgccagtacgattactgtaactcttggtcatctccgcagcttcaaagttctttacccgaacctcacgatagaccactggccctccccctcagcgattcccaaatacaatggttttaccaagcacttaatctgtccctacccttgcccaacttccatgcaggcaccgagcccgatggtctggatcccatggtgacattgagtctcaacctcggcctatctttcgccgaactccgaagaatgtatctcttcttgaacagctccggactgctagtccttccacaggctggtcttctgacaccgcatccctcctag

SEQ ID NO: 14778 - RNA, 1086 nt, synthetic construct
  misc_feature 1..1086: note = source = /note="Description of Artificial Sequence: Synthetic coding sequence"
  source 1..1086: mol_type = other RNA
atggcatcactcggccttctcctccttttgctactgactgcccttccccctctttggagctcctcgttaccggggcttgatacggctgagagcaaagctactattgctgacctgattttgtccgcccttgaacgcgcgactgtctttttagaacaaaggctgccagaaataaatctggatgggatggtcggagtgcgggtgctagaagaacaactcaagtctgtccgcgagaagtgggcccaggagccactgttgcagcccttgagcctgcgggtagggatgctcggcgagaaactggaagccgctattcagagaagcctgcattaccttaaacttagtgacccaaagtaccttcgcgaattccagttaacattgcagccggggttctggaaactgcctcacgcatggatccacaccgacgcgagcctcgtctatcctaccttcggcccacaggactcattttccgaagaacgaagcgacgtctgtttggtgcaactgcttgggaccggtactgattcttccgagccctgtggactctctgacctctgccgctcattgatgaccaagcctggctgctctgggtattgtttgtcccaccagttgttgttttttctgtgggctaggatgaggggttgcacccagggcccgctgcagcagagtcaagactacataaatcttttttgtgcaaatatgatggatctaaacaggcgtgcagaggcaataggctatgcctaccctactcgtgatatcttcatggagaacataatgttttgcgggatgggcggcttttcggacttttataagctgagatggctagaggctatactttcatggcaaaaacaacaagagggatgcttcggggagccagatgccgaggacgaggaactcagtaaagctattcaataccagcaacatttttcccggcgggtcaaaagaagagaaaagcagtttccggatgggtgttcttctcataacacagcgacagccgtcgcggctctaggaggcttcctgtacatcctcgccgagtacccaccagcaaatagagaacctcaccccagcacaccaccacctcccagttctcgctag

SEQ ID NO: 14779 - RNA, 162 nt, synthetic construct; identical to SEQ ID NO: 13140
  misc_feature 1..162: note = source = /note="Description of Artificial Sequence: Synthetic coding sequence"
  source 1..162: mol_type = other RNA

SEQ ID NO: 14780 - RNA, 1305 nt, synthetic construct
  misc_feature 1..1305: note = source = /note="Description of Artificial Sequence: Synthetic coding sequence"
  source 1..1305: mol_type = other RNA
atggcctcgctgggattacttctgctcctcctgctcacagctcttccccctctgtggtccagctctcttcctggattagacactgccgaaagtaaggccacaatcgccgatctcatcctttctgccttggagcgtgcgacagtcttcctggaacagcggctgccagaaataaacctggacgggatggtaggggtgcgcgtacttgaagagcaactcaaaagcgtccgggagaaatgggcccaggaacctttacttcagcctttgtccctgagggtggggatgttgggagagaaactcgaagccgcaattcagagaagtttgcattatctgaagctaagcgatcctaagtaccttcgcgaatttcaacttacccttcaaccagggttttggaagttgccacatgcatggattcataccgatgcatcacttgtgtaccccacatttggcccccaagactccttttcagaagaacgcagcgatgtgtgtctcgtgcagctcctgggaactggcaccgacagtagtgagccgtgcggactctccgacctgtgccgaagtctgatgaccaagccgggatgctccggatactgcctgtcccatcagctgttgttctttctttgggcacgtatgagaggttgcacacaaggacccttacagcaaagccaggactatattaatcttttttgcgccaacatgatggaccttaatcgtagggcagaggctatagggtacgcataccccacacgagacatctttatggaaaatagcgtaaccggccatcccgtgttctaccttcctctttgcgattcatttctcccccctaaagccgccccagttacagaattatacaccgatggcccagtaatgttctgcgggatgggtggctttagcgatttttacaagctgcgctggctggaagccattctgtcatggcaaaagcagcaggagggttgttttggagagcccgatgccgaggatgaagaattaagcaaagccatccagtaccagcaacatttttcccgacgcgtgaaacggagagaaaagcaatttccggactctcgcagtgtggctcaggccggtgtgcaatggcggaacctgggatcacttcagccactccctccaggatttaaacaattcagctgtctcatcctgccttccagttgggactaccgctctgtgccaccatacctggcaaatttctatatcttcttggtagaaacgggctttcatcacgtcgcacacgctggcctggaactgctcatttcgagggacccgcctacatcaggatctcaatcggttggactatag

SEQ ID NO: 14781 - RNA, 1311 nt, synthetic construct
  misc_feature 1..1311: note = source = /note="Description of Artificial Sequence: Synthetic coding sequence"
  source 1..1311: mol_type = other RNA
atgcagggcacacctggtggagggacgcggccaggccctagtcctgtggatagacggaccctgttggtgttttcttttatattagcggcggcattaggacagatgaatttcaccggtgatcaagtcctccgggtgctagctaaagacgagaaacagctgagcctccttggcgacctcgaaggtctcaagccccagaaggtcgatttttggcgcgggcccgccaggcctagtctcccagttgatatgagagttccgttcagcgaactaaaggacattaaagcatacttagaaagtcacgggctagcctattcaatcatgataaaggacatacaggtactgttggacgaggaacggcaggctatggcaaaatcaagacggttagaacgctctaccaattctttctcgtattcatcatatcatactcttgaagaaatatattcctggattgataattttgtaatggagcactcagacatagtgtccaaaatccaaattggtaactccttcgagaaccagtccattttggtcctaaagtttagtactgggggctcccgacatcccgctatctggattgacaccggcatccactctcgggaatggatcacacacgccactggaatctggactgcaaacaaaattgtcagcgattacggaaaggatcgggtacttactgacatcctgaatgctatggacatcttcattgaactggtcactaaccccgatggattcgcgtttacccactcaatgaacaggctgtggcgaaaaaacaagtctattaggccgggaattttctgcatcggagttgacctcaatagaaactggaagagcgggtttggtggaaacggttcaaatagtaacccctgtagtgagacttaccacggaccttcacctcagagcgaaccagaggtcgcagcaatcgtcaactttataacagcccacggcaacttcaaagcgctgatctcaatccactcatattcccagatgctaatgtatccttacggccgcctgctggaaccagtgtccaaccaacgcgagctctacgatctggctaaggacgcagtggaagcattgtacaaagtccacgggatcgagtatatcttcgggagcatttccactactctctatgtcgcatcaggcattacagttgattgggcctacgattcaggtatcaaatacgctttctcattcgaattacgcgacaccggacagtatggctttcttctacctgctactcagataatccccacagcccaagaaacctggatggccctccgaacaattatggaacacactctaaaccatccctattag

SEQ ID NO: 14782 - RNA, 1218 nt, synthetic construct
  misc_feature 1..1218: note = source = /note="Description of Artificial Sequence: Synthetic coding sequence"
  source 1..1218: mol_type = other RNA
atggacacgattttcctctggtcacttctgttattattctttggaagtcaagctagcaggtgcagcgcccagaaaaacaccgagttcgccgttgacttataccaggaggtctctctcagtcataaagataacatcattttttctcctctaggaataaccctggtacttgagatggtgcagctgggcgctaagggcaaagcacagcaacagatcaggcagaccctcaaacaacaagaaacctccgcaggcgaggaattcttcgtcctcaagtcttttttttctgcaatcagcgaaaaaaaacaggagttcaccttcaacctggccaacgcactatacctacaggagggcttcaccgtcaaggaacagtatctgcatgggaacaaggaattctttcagagcgccatcaaacttgttgattttcaagatgccaaggcctgcgcggaaatgatttctacctgggtggagcgaaaaaccgacggaaaaatcaaagacatgttttcaggcgaggaattcggaccactcacacgactcgtcctggtgaatgcaatttacttcaagggagattggaagcagaaattcagaaaggaagacacacagctgatcaattttacaaaaaagaatgggtctaccgtgaagattcctatgatgaaagccctccttcgtactaagtacggatatttctcagagtcaagtctgaactatcaggttttggaactcagctacaaaggagacgaattttcactgattattatcttacccgcagagggaatggacatcgaagaggtcgaaaaattgatcacagctcaacaaatattgaaatggctgtcagaaatgcaagaggaggaagtagagatctccttacctcggtttaaggtcgaacagaaagtcgatttcaaggacgtgttgtatagcctgaacattactgagattttcagcggtggttgcgacctgagtggaattactgacagctcagaagtgtatgtatcccaagtgacccaaaaggttttttttgaaatcaacgaagatgggtccgaggccgcaacctctacaggaattcacatccccgtaattatgtccctggcgcaaagtcagtttatagccaatcatccatttctgttcattatgaagcataacccaaccgaatctattctctttatgggccgcgtcaccaaccctgatacccaggaaatcaaaggaagggacttagactcattatag

SEQ ID NO: 14783 - RNA, 510 nt, synthetic construct
  misc_feature 1..510: note = source = /note="Description of Artificial Sequence: Synthetic coding sequence"
  source 1..510: mol_type = other RNA
atgctctatcagaccattaattctctcaagaccaaaaatcctaaattgaaaattctgctgtctattgggggctatctgtttggctccaagggctttcatcctatggtcgactcgtctactagccgattagaatttattaacagtattattctcttcctgcgcaatcacaatttcgacggacttgatgtgtcttggatttatccggaccagaaggaaaatacacatttcacagtgctaattcacgaactggctgaggcattccagaaagattttacaaaatccacaaaggaacgtctcctgcttactgcaggagtatccgccggaaggcagatgattgataactcataccaagtggaaaaactagcgaaggacttagatttcattaacctactcagttttgacttccatggatcatgggaaaagcctctgattaccggacataactctccgctctctaaagggtggcaggaccgaggacccagcagctactacaacgtagaatatgcatag

SEQ ID NO: 14784 - RNA, 1209 nt, synthetic construct
  misc_feature 1..1209: note = source = /note="Description of Artificial Sequence: Synthetic coding sequence"
  source 1..1209: mol_type = other RNA
atggcttcgctggggctcctactgctgctgctgttaacggctcttcctcctttgtggtccagtagcttgcccggcctggatacagccgaatcgaaagctaccattgccgacctgatactgtcagccttagaacgagcgaccgtttttctcgaacaaaggcttcccgagataaatttagatggtatggttggggtcagagtgctggaagaacagcttaagtctgtgcgagagaagtgggcgcaagagcctttattgcagccactttcactgagagtcggaatgctaggcgaaaagttagaggcagctatccagcgctccctccactatctaaaattgagcgatcctaagtacctacgagagtttcagctaaccctgcagccaggattttggaagctccctcatgcttggatacataccgatgcttcactggtgtaccctacatttgggccccaggactcctttagcgaagagagatccgacgtttgtcttgtgcagctactcggtactggtacagactcttcagagccctgcggcctgtccgatctgtgtcgaagcttaatgaccaagcccggctgttcaggctactgtttatcccatcagctgttatttttcttgtgggccaggatgagagggtgtactcaaggaccgctacaacaatcccaggactacatcaatttgttttgcgccaacatgatggatctgaatagacgtgctgaagccattggttatgcatatccgacaagggacattttcatggaaaacatcatgttctgcggcatgggtggcttttccgacttctataaattacgttggcttgaagctattttatcctggcagaagcagcaggaaggttgttttggcgaaccagatgctgaggacgaggagctttccaaggcaatccagtaccagcagcatttcagcagacgtgtcaaaagaagagaaaaacagtttcctgattcccggtctgtggcccaagccggggttcagtggcgtaacctggggtccctacagcctctgccgcctgggttcaaacagttctcttgtcttattctgccctcttcgtgggattataggtccgttcccccatatctggccaacttttacatctttctcgttgagaccggcttccaccacgtagcacacgcagggttggagttgctgataagtcgcgacccccccacatcaggttctcagtcagtcggcttgtag

SEQ ID NO: 14785 - RNA, 1680 nt, synthetic construct
  misc_feature 1..1680: note = source = /note="Description of Artificial Sequence: Synthetic coding sequence"
  source 1..1680: mol_type = other RNA
atgtggactaatttttttaagctccgtctgttttgttgtcttctggccgtcctcatggtggtggtactggtcattaatgttacccaggtggaatatctggaccacgaaactgtcagcgccacatttatagactcaagtggccaattcgtaagtagccaagtgaccggaatttccaggaatccttactgcggatacgaccagcagaccttatctagccaggaacgaatggaagaggattcactgctagccgctttacacagacaagtccctgatgtgggcccagtccccttcgtcaagtcaacagacccaagttcttcctactttgttatcttgaattccgccgcattttttaaagtgggatctcaactggaagtgctagtccacgtgcaggattttcagcgaaagcctaaaaaatacggaggtgattatcttcaggcgcgaatccactccctgaagttacaggccggcgctgtgggaagagttgtcgactaccagaatggtttttacaaagttttttttaccctattatggccaggcaaggtgaaagtgagtgtgtctctcgttcatccgagtgaaggtattagggtgcttcagagattacaggaggataagcccgatagagtatacttcaagtctttatttcgttccgggagaatttcagagaccacagagtgtaacgtatgcttgccaggcaacctgccgttgtgcaatttcacagacctctacacaggggaaccatggttctgttttaagccgaagaaactcccttgctccagccgcattacacatttcaaagggggctacttgaagggattactgaccgcagctgagagcgcatttttccagagcggtgtcaatataaaaatgccggttaattcttctggtccggattgggttactgtcatccccagaaggataaaagaaacaaattctctggagctctctcagggcagcggtacttttcccagcggctattactataaggaccagtggagaccgaggaaattcaaaatgagacagttcaatgacccagataatatcaccgaatgtctacagcggaaagtggtacatttgttcggcgactcaaccatacgtcagtggtttgaataccttacaacattcgtgccagatcttgttgagttcaacctggggtctcctaagaacgtgggacctttcctggcagtcgatcagaagcacaacattctgctgaaatatcggtgtcacggcccacctatccgatttacaaccgtattctccaacgaactgcactacgtggccaacgaattgaatgggatcgtcggcggaaagaataccgtagtagccatagccgtgtggagccacttcagcacatttcccctggaggtctacatcagaagactgcgcaatatacgccgggcagtggtccgactcctggacagatcaccaaaaaccgtcgtagtcatccgtaccgcaaacgcccaagaactggggcccgaagtctctctctttaatagcgattggtacaacttccagctggatactatacttagacgtatgttcagtggcgttggagtgtatcttgtcgacgcctgggagatgaccctcgcccactaccttccccataagctgcatccggatgaagtgattgtcaaaaaccaactggatatgttcctctctttcgtttgcccactcgaaacttag

SEQ ID NO: 14786 - RNA, 402 nt, synthetic construct
  misc_feature 1..402: note = source = /note="Description of Artificial Sequence: Synthetic coding sequence"
  source 1..402: mol_type = other RNA
atggccatggtctctgctatgtcttgggtcctgtacctttggatctccgcatgcgctatgcttctctgtcatggatctctgcaacatactttccaacaacatcacctccatcgacccgagggtggcacctgcgaagtgatcgcagcacacaggtgctgtaataagaaccggatagaagagcgaagccaaaccgttaaatgctcctgtctccctggtaaggtggcaggcaccactaggaaccgaccttcatgtgttgacgcctccattgtgattggaaagtggtggtgcgagatggaaccatgtctggaaggcgaagaatgcaaaacactgcctgataattctggatggatgtgtgctactggaaacaaaatcaagacaactaggatccacccaagaacgtag

SEQ ID NO: 14787 - RNA, 606 nt, synthetic construct
  misc_feature 1..606: note = source = /note="Description of Artificial Sequence: Synthetic coding sequence"
  source 1..606: mol_type = other RNA
atgaaagtccacatgctggtgggggtgctggtgatggtagggttcacagtgggcaaagtccctgttcctgacattcgaacttgtcacttttgtctggttgaggatccatcagtcggctgtattagtggctcggaaaagtgcactatctcttccagtagtctgtgcatggttattacaatttactacgatgtgaaggtgcggttcatagtgcggggttgcggacaatacatcagctatcgctgccaagaaaaaagaaacacatattttgccgagtattggtatcaggcacagtgttgccaatacgattattgtaactcctggtcttcacctcaactgcagagcagtctccctgagcctcatgacagacctttggccctgccccttagcgactcccaaattcagtggttctaccaggccttaaaccttagcctaccgctaccaaattttcacgctggaactgaacccgatggcctggaccctatggtaactctatcactaaatctgggactaagctttgccgagctgagaagaatgtacttatttttgaattcatcagggctgctggtgctaccccaagccggtctgctgactccccatccgagttag

SEQ ID NO: 14788 - RNA, 606 nt, synthetic construct
  misc_feature 1..606: note = source = /note="Description of Artificial Sequence: Synthetic coding sequence"
  source 1..606: mol_type = other RNA
atgaaagtgcatatgctggtgggtgtactcgtgatggttgggttcacggtcgggaaagtccctgtcccggacatcagaacatgtcacttttgcttagtggaagatccgtctgttgggtgtatcagcgggtcagagaagtgtaccatctcaagtagcagcctatgtatggtaatcactatatactatgacgttaaggttaggtttatcgtccggggttgtggacaatatatttcttatcgctgtcaagaaaaaagaaacacctattttgcagagtattggtatcaggcccaatgttgtcagtacgattactgtaattcttggtcctctccgcaacttcagtcttcactgcccgaaccccacgacagacccttggcccttcccttgagtgacagccagatacaatggttctaccaagctttaaatctttctttgccactgccaaacttccatgctggcactgaaccagatggcctcgaccccatggtgaccttgtctttgaatctcggcctgagttttgctgaactgcgccgtatgtatcttttcttgaactctagtgggctgctcgtacttccacaagccggattgcttacgccacacccaagttag

SEQ ID NO: 14789 - RNA, 732 nt, synthetic construct
  misc_feature 1..732: note = source = /note="Description of Artificial Sequence: Synthetic coding sequence"
  source 1..732: mol_type = other RNA
atgggcccagaagctttgtcttctctactgctccttctgcttgtggcaagtggggacgcagacatgaagggacattttgatcccgccaaatgccgttatgccctcggaatgcaagatcgcaccattcccgactcagatatttccgcctcttcctcatggagcgattccaccgcggctcgtcacagtcggcttgagagtagcgacggggacggagcttggtgtcctgccgggagtgtcttccctaaagaagaagagtacttgcaggtagatttgcagcggttacatctagtggctctggtcgggactcagggccgtcatgctggagggctgggcaaggagtttagccgatcgtataggctcagatactcacgagatggtaggagatggatgggatggaaggatcgatggggtcaggaggtgatttccggtaatgaggacccagagggggtggtgttgaaagatttgggcccacccatggttgccagactggtcagattttatcctagagccgatcgggtgatgtcagtgtgtctcagggtggaactttatgggtgcttgtggcgcgattgctcaatgggagtgtgggcttcatggcagatggtgtggtggggctggatgactctgggaagagtgcgcagctgtgggtcaggacaggcaatgactatgtgggatggagccactacggcaagtcctgtggccatgtggcggtggtctctttctcttacaggctag

SEQ ID NO: 14790 - RNA, 258 nt, synthetic construct; identical to SEQ ID NO: 13151
  misc_feature 1..258: note = source = /note="Description of Artificial Sequence: Synthetic coding sequence"
  source 1..258: mol_type = other RNA

SEQ ID NO: 14791 - RNA, 348 nt, synthetic construct
  misc_feature 1..348: note = source = /note="Description of Artificial Sequence: Synthetic coding sequence"
  source 1..348: mol_type = other RNA
atgggacgagtgtttctgacaggagagaaagctaattctatactgaaaaggtatccccgggctaatgggttcttcgaggaaattcgccaggggaacatcgagcgagaatgcaaggaggagttctgtaccttcgaagaagctagagaggcttttgagaataacgaaaagaccaaagaattttggagtacctataccaaagcacagcagggcgagagcaacagaggctccgactggtttcagttttaccttacctttccacttatcttcgggctctttataatactgctagttatcttcttgatatggagatgttttttgcgaaacaagacccgaaggcagaccgtctag

SEQ ID NO: 14792 - RNA, 606 nt, synthetic construct
  misc_feature 1..606: note = source = /note="Description of Artificial Sequence: Synthetic coding sequence"
  source 1..606: mol_type = other RNA
atgaaggttcatatgttagtgggcgtactggtgatggtgggattcacagttggtaaggttcctgttccagacattagaacctgtcacttctgcctcgtagaggatccttccgtcggctgcatcagtggctctgaaaaatgcactatctcttcttctagcttatgcatggtcataactatctactatgacgtcaaggtgcggttcatcgtgagaggctgtggacagtacataagttatcggtgtcaagaaaaacgtaatacatatttcgctgaatattggtaccaggctcagtgctgtcagtacgattattgtaactcctggtcttctccacagttacagtcctcgctcccagaacctcatgatcgccctctcgctttgccactgtccgacagccaaatccaatggttctaccaggctcttaacctctctttacccttacctaactttcacgccggcacggaaccagatgggctcgaccccatggtgacattgtcattaaacttaggactgtcatttgctgagcttagacgtatgtatctgttcctgaattccagcggcttactagtccttccacaggctgggcttctgactccccatccatcttag

SEQ ID NO: 14793 - RNA, 1311 nt, synthetic construct
  misc_feature 1..1311: note = source = /note="Description of Artificial Sequence: Synthetic coding sequence"
  source 1..1311: mol_type = other RNA
atgcaggggacccctggcggcggtacccgaccaggcccctctccggttgacagacgcaccctgttggtcttttcctttatccttgctgcagcactagggcaaatgaactttacaggcgaccaggtgttaagggtactcgcaaaggatgagaaacaactttccctactgggcgacctcgaagggctaaaaccccagaaagtggacttctggcgcggtccagctagaccatctctcccggtcgatatgagggtgcccttttctgagctcaaggacattaaggcatatctagaatcccatggcctagcctactcaataatgatcaaggacattcaggttttgctagacgaggaaagacaggcgatggcaaaatctcgaaggcttgaaaggtccacaaattccttttcgtattccagctaccacaccctggaggagatctattcttggatcgataacttcgtgatggagcattcagacattgtcagcaaaatacagatcggcaactctttcgagaaccaatcaatactcgtgcttaagtttagtactggtggcagccggcaccctgcaatctggatagatacaggcattcactcaagagaatggatcacccatgccacaggcatctggacagccaacaaaattgtcagcgattacggaaaggatcgcgtattaaccgacatcctgaatgccatggatatttttatagaattagtcaccaacccagatggctttgcatttactcattccatgaacagactatggagaaaaaataagtcaatacgaccaggaatcttttgtattggagtggatctgaataggaattggaagagtggattcggcggcaatggcagcaattcaaacccctgctcagagacttatcatggtccatccccgcaatccgagcccgaagttgctgccatcgtgaactttatcactgcccatgggaattttaaagccttgattagtatccattcatacagccagatgctgatgtatccttatggtcggttgcttgagcccgtctccaatcagcgcgaattgtatgacctagcgaaagatgctgtggaagccctgtacaaagtccatggaatcgagtatattttcggatctatcagcacgacgctctatgttgcctcaggcataaccgtagattgggcctatgactccggaattaagtatgcgttttcgtttgagttacgggacacaggacaatacggattcctcctgcctgctactcaaattattccgacagctcaggaaacttggatggctctgcgcactatcatggaacacaccttaaaccacccatactag

SEQ ID NO: 14794 - RNA, 606 nt, synthetic construct
  misc_feature 1..606: note = source = /note="Description of Artificial Sequence: Synthetic coding sequence"
  source 1..606: mol_type = other RNA
atgggtgcaaccacaatggaccagaaatccctgtgggctggcgttgtcgtcctgctcctcctgcaaggtggttcagcctataaactcgtgtgctactttactaactggtctcaggaccggcaggagccgggcaagtttacgcccgaaaacatagaccctttcctgtgttcgcacctgatctactcctttgcctcaattgaaaacaataaagttataataaaagacaagtccgaagttatgctctaccaaaccattaactcactcaagaccaaaaatccaaagcttaaaatcctcctgtccatcggcggctatctgtttgggagtaaaggatttcatcccatggtggattcttcaacctcaagactggagttcattaatagtattatacttttcttgcgtaatcacaattttgacggcctggacgtgagctggatctatcccgaccaaaaggagaatacccacttcaccgtgttaattcatgaactggctgaggcttttcagaaggacttcacaaaatctactaaagaacggctgctcctcactgctggcgtgtccgcaggaagacagatgatagacaattcctaccaagtcgagaaactggcctag

SEQ ID NO: 14795 - RNA, 75 nt, synthetic construct; identical to SEQ ID NO: 13156
  misc_feature 1..75: note = source = /note="Description of Artificial Sequence: Synthetic coding sequence"
  source 1..75: mol_type = other RNA

SEQ ID NO: 14796 - RNA, 252 nt, synthetic construct; identical to SEQ ID NO: 13157
  misc_feature 1..252: note = source = /note="Description of Artificial Sequence: Synthetic coding sequence"
  source 1..252: mol_type = other RNA

SEQ ID NO: 14797 - RNA, 1254 nt, synthetic construct
  misc_feature 1..1254: note = source = /note="Description of Artificial Sequence: Synthetic coding sequence"
  source 1..1254: mol_type = other RNA
atgttagccctcttggtgctggttacagtagcgttagcctcagctcatcatggtggcgagcactttgaaggggagaaggtgttcagggtcaatgtagaagacgagaaccacattaatatcattagagaactggcgagcacaacccagatcgacttctggaagcctgactctgttacccaaattaagcctcatagcacagtcgacttccgagttaaagccgaagataccgtaacagtggaaaacgtactcaagcagaatgagctccagtataaggtgttaatatcaaatttaaggaacgtggttgaggcccagtttgactcaagagtgagagcaacagggcatagctatgagaaatacaacaagtgggaaacgatcgaggcatggacccaacaggtggctacagagaacccagcgctgataagtagaagcgtaatcggaacaaccttcgagggcagagcaatatacctgcttaaagtgggcaaggccggtcagaataaacccgcaatctttatggactgtggcttccatgcaagggaatggattagtccagccttctgtcaatggttcgtcagagaggctgtcaggacttacgggagagagatacaggttacagagttgctcgacaaactggacttttacgtgcttcctgtcctgaacatcgacggttacatatatacttggacgaagagccgcttctggaggaagactcgatcaacacacaccggaagtagttgtatcggcactgaccccaaccgtaactttgacgcaggttggtgtgaaattggagccagccggaatccatgtgacgagacatactgtggtcctgcggcagaaagtgagaaggagactaaggccttagcagatttcattcgcaacaaactgtcttcaatcaaagcatacctgacaattcatagctactcacagatgatgatctacccttattcttacgcctataaacttggagaaaataacgcagaattaaacgccctcgccaaggcaaccgtgaaggagcttgccagcctgcacggcactaaatatacctatgggccaggtgccacgactatctaccccgcagccggaggaagcgatgactgggcctatgaccaggggatacgctacagtttcactttcgaactgagagacacgggcaggtacgggttcctgttaccagaatcccagataagagccacctgcgaagaaaccttcctggctataaaatacgtcgcatcctatgtactagaacacctctactag

SEQ ID NO: 14798 - RNA, 1680 nt, synthetic construct
  misc_feature 1..1680: note = source = /note="Description of Artificial Sequence: Synthetic coding sequence"
  source 1..1680: mol_type = other RNA
atgtggacgaacttctttaagcttcgacttttctgctgcttacttgccgtgctaatggtggtggtactggtaatcaacgtgactcaggtggagtatctggaccacgaaactgtgtccgcaacttttatcgactcatccgggcagttcgtgagctcccaagtgactggaatttcgagaaatccctattgcggctatgaccagcagaccctctcttcccaagaacgcatggaagaagattccctcctggcggccctgcacagacaggtccctgatgtcgggcctgttcccttcgttaaatccactgacccgtccagctcttactttgtgatcctgaattcagcagctttcttcaaggtaggctcacagttagaggtccttgtgcatgtccaagacttccaaagaaagccaaaaaagtatgggggagactatctacaagccaggatccactcactcaaacttcaggctggggctgtagggagagtcgtagactatcaaaatggattttacaaggtgtttttcacattgttatggccaggtaaggttaaggtgtctgtgtcgttggtgcacccaagtgaaggcatccgcgtgctgcagcggttacaggaggacaaacctgacagagtgtattttaagtccctatttcgatcaggacgaatatcagaaaccactgaatgtaatgtttgcttaccagggaatttgcctctctgcaactttaccgatctatataccggcgaaccatggttctgcttcaaacctaaaaaactcccatgctcttctcgcattactcatttcaaaggtggctacctcaagggcctcctgactgcagccgagagtgcgttcttccaatcaggcgtgaacattaaaatgcccgtgaactccagcggaccggattgggtgaccgtgatacccagacgaataaaggagacgaatagcctggagctgagccagggatccggcaccttcccatccggatattattacaaagaccagtggagaccccgcaagttcaaaatgaggcaatttaacgatcctgataatattacagagtgcctccagcgcaaggttgttcacctcttcggcgatagcacaattaggcagtggttcgagtacctcacgacatttgttcccgatctggtggagttcaatctaggatcaccaaagaatgtgggaccatttctcgcggtggatcagaaacataatattctactaaaatacagatgccatggtccacctatcaggtttaccacagtgtttagtaacgagttgcactacgtggccaatgagttgaacggtatagtgggcggcaaaaacaccgtggtggctattgctgtttggtcgcacttttcaacattcccacttgaggtgtatatccgtcggttgcgaaatattcgccgcgccgtggtgagactcctagatagatctcctaaaacggtagtggttattcgcacagcaaacgcacaagagcttggccctgaagttagtttattcaactccgactggtataactttcagctcgacacaattctccgcaggatgttttctggagtcggcgtatacctggttgatgcctgggagatgacgcttgcacactatttgccccacaagctacaccccgacgaagtcatcgtgaagaaccagctggacatgttcttatccttcgtgtgcccccttgagacctag

SEQ ID NO: 14799 - RNA, 99 nt, synthetic construct; identical to SEQ ID NO: 13160
  misc_feature 1..99: note = source = /note="Description of Artificial Sequence: Synthetic coding sequence"
  source 1..99: mol_type = other RNA

SEQ ID NO: 14800 - RNA, 180 nt, synthetic construct; identical to SEQ ID NO: 13161
  misc_feature 1..180: note = source = /note="Description of Artificial Sequence: Synthetic coding sequence"
  source 1..180: mol_type = other RNA

SEQ ID NO: 14801 - RNA, 303 nt, synthetic construct; identical to SEQ ID NO: 13162
  misc_feature 1..303: note = source = /note="Description of Artificial Sequence: Synthetic coding sequence"
  source 1..303: mol_type = other RNA

SEQ ID NO: 14802 - RNA, 234 nt, synthetic construct; identical to SEQ ID NO: 13163
  misc_feature 1..234: note = source = /note="Description of Artificial Sequence: Synthetic coding sequence"
  source 1..234: mol_type = other RNA

SEQ ID NO: 14803 - RNA, 12 nt, synthetic construct
  misc_feature 1..12: note = source = /note="Description of Artificial Sequence: Synthetic coding sequence"
  source 1..12: mol_type = other RNA
atgtggacatag

SEQ ID NO: 14804 - RNA, 402 nt, synthetic construct
  misc_feature 1..402: note = source = /note="Description of Artificial Sequence: Synthetic coding sequence"
  source 1..402: mol_type = other RNA
atggccatggtatccgctatgtcctgggtcctttatctttggatttctgcttgtgcgatgctcctctgtcatggaagcttacagcacaccttccagcagcatcatctacacaggcccgaaggcggaacatgtgaagtcattgccgcacaccgctgctgtaacaagaaccggattgaggagagaagccagacagtcaaatgctcatgccttcccgggaaagtagccggtactacacgaaaccgtcccagctgcgtggatgcaagtattgttatcggtaagtggtggtgcgaaatggagccttgtttagaaggggaggagtgcaagacactaccagacaacagcggatggatgtgcgccactggaaataagattaagacaaccaggattcatccaaggacttag

SEQ ID NO: 14805 - RNA, 600 nt, synthetic construct
  misc_feature 1..600: note = source = /note="Description of Artificial Sequence: Synthetic coding sequence"
  source 1..600: mol_type = other RNA
atgaccatgcgccacaactggacccctgatctctccccattatgggtcctgctactctgtgctcacgtcgtgacactcctagttagagctacgccagtttcccagaccaccaccgccgccaccgcctctgtgagatccacgaaggacccatgccccagccaacccccggtcttccccgcagccaaacagtgcccagccctggaagtgacttggcctgaggtcgaagtgccattaaacggtacccttagcctgtcctgcgttgcgtgcagccgtttcccaaacttttccattttatactggcttggaaatggtagctttattgaacatctgccagggagactgtgggagggctccacatctcgagaaagaggaagtaccggtactcagctttgcaaagcgcttgtcctggaacagttaactccggcgctacactctacaaacttcagctgtgttctcgtcgatcctgaacaggttgttcagaggcatgtggtcctggcccagttgtgggtgcggtcaccacgtaggggtctgcaagagcaagaggagctgtgtttccatatgtggggaggcaaaggcgggctctgtcaaagtagcctttag

SEQ ID NO: 14806 - RNA, 1044 nt, synthetic construct
  misc_feature 1..1044: note = source = /note="Description of Artificial Sequence: Synthetic coding sequence"
  source 1..1044: mol_type = other RNA
atgggtgtggtacagtacggtgataatcccgcaacacactttaacctgaaaacacacactaattcacgggacctaaaaacggcaatcgagaagattacccaacgcggcggtttgtctaacgtgggcagggctatttctttcgtgactaagaatttcttcagcaaggccaatggcaatagaagcggagcaccgaatgtagtcgtagttatggtcgacggatggccaacagacaaggttgaggaagcaagcagactggctcgtgaatccggcataaacatttttttcattactattgagggggcagccgagaatgagaaacaatacgtggttgagcctaatttcgccaataaggctgtctgccggacgaacggcttctatagtctgcacgttcagagttggtttggcctccacaaaacactgcagcctcttgttaaaagagtttgtgacacagaccgcctggcctgtagcaaaacatgtttgaactctgctgacataggatttgtgatcgatggaagctctagtgtgggaacaggtaactttagaacagtgctccagtttgtaacaaacttaaccaaagaattcgagatttccgacacagatacgagaattggcgccgtgcagtacacttacgagcagcggctggaatttggatttgacaaatacagctctaagccagacattctcaacgctattaaacgggtcggctattggtctggcggcacttcgaccggagcagcgattaactttgcccttgaacagctctttaagaaatcaaagcctaacaagcgaaaactgatgatattaatcaccgatggacgctcttatgacgatgttagaatccccgccatggctgcgcatctcaagggggtgatcacatacgcaatcggcgttgcgtgggccgctcaggaagaactagaggtgatagcgacgcatcccgcaagagaccattcatttttcgtagatgagttcgataacctacaccaatacgtgccacgcattattcagaatatttgtaccgaattcaacagtcagccccggaactag

SEQ ID NO: 14807 - RNA, 27 nt, synthetic construct
  misc_feature 1..27: note = source = /note="Description of Artificial Sequence: Synthetic coding sequence"
  source 1..27: mol_type = other RNA
atgcaaggaacaccagggggcggctag

SEQ ID NO: 14808 - RNA, 369 nt, synthetic construct
  misc_feature 1..369: note = source = /note="Description of Artificial Sequence: Synthetic coding sequence"
  source 1..369: mol_type = other RNA
atgctgtaccagacaatcaactcactgaaaacaaagaaccctaaactcaaaattttgctctccattggcggatacttatttggatctaaaggatttcatcccatggttgactcttccacctcaaggctggagtttatcaactccatcatcctatttttacggaatcacaacttcgacggcctggacgtatcttggatttatcccgatcaaaaggagaatacacattttactgtgttgatccacgaattggccgaagcatttcaaaaggatttcacaaagagtacaaaggagaggctgttattaacagctggagttagtgcaggtagacagatgattgacaactcttatcaggtggagaaacttgcgtag

SEQ ID NO: 14809 - RNA, 309 nt, synthetic construct
  misc_feature 1..309: note = source = /note="Description of Artificial Sequence: Synthetic coding sequence"
  source 1..309: mol_type = other RNA
atgagagtgtctggcgttctgcggctacttgccctcattttcgccattgtgaccacatggatgtttatcaggagctatatgagtttttctatgaaaacaatccgactgccacgttggctggcagcatcccccacaaaagaaatacaggtgaagaaatacaagtgcggcttgatcaagccctgccccgccaattactttgcatttaagatttgttcaggcgctgctaatgtggtcggacctacaatgtgcttcgaagataggatgattatgtctcccgtcaaaaataacgtaggtagaggcctcaactag

SEQ ID NO: 14810 - RNA, 660 nt, synthetic construct
  misc_feature 1..660: note = source = /note="Description of Artificial Sequence: Synthetic coding sequence"
  source 1..660: mol_type = other RNA
atgaaactgctactctgggcatgtattgtgtgcgttgcattcgcaaggaagagaaggtttccattcattggcgaagacgacaacgacgatggacaccccctgcacccctccctcaacataccctacggaattcgaaaccttccccccccactgtactaccgacccgtgaacaccgtgccatcctaccctggcaacacctataccgacactggactcccatcctacccctggattttaacaagtcctggcttcccctatgtgtaccatattagagggttccctttagctactcagctcaatgtcccccctctgccccctcgcggcttcccctttgttccgccttcccgtttcttttccgccgcagctgctcctgcggcccctcccattgccgccgagcccgccgccgctgcacccctaactgccacacctgtcgccgcagagccagcagcaggcgctcctgtggccgccgagccggcagctgaggcccccgtaggtgctgaacccgctgccgaagcccccgtcgctgccgagccagctgcggaggccccggtgggagttgagccagcggctgaggagccatcacccgccgaacccgccacagccaagcccgctgcgcccgaaccacacccgtcaccttccctagaacaagccaaccagtag

SEQ ID NO: 14811 - RNA, 1869 nt, synthetic construct
  misc_feature 1..1869: note = source = /note="Description of Artificial Sequence: Synthetic coding sequence"
  source 1..1869: mol_type = other RNA
atgggaaagagtgagggtcccgtgggaatggtagaaagtgcggggagggccggtcagaaaagacccggctttctggagggcggtttactactcctgctcctcctggtgaccgcagcgttagttgcgctcggagttctgtacgccgacaggagaggtaaacagctgccacgtctggcatccaggctgtgtttcttacaagaagaaagaacatttgtgaaaagaaagcctcgtggaattcccgaagctcaagaggtgtctgaagtttgcaccactccaggctgtgtgatcgctgcagcacggattttgcagaatatggatcccactaccgaaccatgtgatgatttttatcagttcgcttgtggagggtggttacgccgacacgtaattcccgaaacaaattccagatattcaatcttcgatgttcttcgcgatgaattagaagtaattttgaaagccgttctcgagaatagcactgctaaggcaacagttccccaagaagagagacatgacgtaattgctctgtaccatagaatgggccttgaagaactccaaagtcagttcggcttaaaaggttttaattggacattgttcatccagaccgtcttgagctccgtgaagataaagctgttacccgatgaagaagtggttgtgtacggcatcccctacctgcagaatttggaaaacatcattgatacatatagcgcgcgcacaatacaaaactatttagtgtggaggttagtgctggatagaataggatccctctcgcagcggtttaaggacacacgtgtaaactataggaaggcgctgtttggcacaatggttgaagaagttaggtggcgggagtgcgttggttacgtgaattccaacatggagaacgccgttggctctttgtatgtgcgcgaggcgtttcccggcgactctaagtcgatggtacgggaactgatagataaagtgaggacggtgttcgttgagacgctagatgagctgggatggatggacgaggaatctaagaagaaagcccaggagaaggcaatgagtatacgagaacaaatcgggcaccccgattacatcctggaagaaatgaacagaaggctagacgaggagtatagcaatctaaacttcagcgaagacctttatttcgagaactcactgcaaaacttgaaggtgggtgcccagaggagtctgagaaagttgagggagaaggtcgacccaaatctatggattattggtgcagctgttgtcaacgccttctatagccccaatcgcaaccaaatagtgtttccagccggtatacttcagcctcccttctttagtaaagaacagccccaggcactcaattttggaggaatcggaatggtaatcgggcacgaaattacccatgggttcgatgacaacgggagaaacttcgacaagaatgggaacatgatggactggtggtctaacttttcaacccagcattttcgcgagcagtctgagtgtatgatctatcaatacgggaactatagctgggacctggcagacgaacagaatgttaatggatttaataccttgggagaaaatatcgcagacaacggaggagtcagacaggcctataaggcttacctgaagtggatggccgaaggtggaaaagaccagcagttgcctggattagaccttacgcacgagcaactcttcttcattaattatgcccaagtgtggtgtggtagttaccgtcccgaatttgccattcagtccatcaaaaccgatgtgcacagccccctgaagtatcgcgtcctggggagccttcagaatttggctgccttcgcagacacctttcattgtgcccgaggaacccctatgcatccaaaagagcgttgtagagtctggtag

SEQ ID NO: 14812 - RNA, 168 nt, synthetic construct; identical to SEQ ID NO: 13173
  misc_feature 1..168: note = source = /note="Description of Artificial Sequence: Synthetic coding sequence"
  source 1..168: mol_type = other RNA

SEQ ID NO: 14813 - RNA, 156 nt, synthetic construct; identical to SEQ ID NO: 13174
  misc_feature 1..156: note = source = /note="Description of Artificial Sequence: Synthetic coding sequence"
  source 1..156: mol_type = other RNA

SEQ ID NO: 14814 - RNA, 1620 nt, synthetic construct
  misc_feature 1..1620: note = source = /note="Description of Artificial Sequence: Synthetic coding sequence"
  source 1..1620: mol_type = other RNA
atgtccgaaccccaggagaaaaaacttagcgaaaacaccgatttcttagctcccggagttagtagttttaccgattccaaccagcaggaatctatcaccaaaagagaagaaaaccaagaacagcccagaaattatagccatcatcagttgaacaggagctcgaagcacagccaaggcttaagggaccaaggcaaccaggaacaggaccccaatatatcaaatggcgaagaggaagaggagaaggaacccggagaggtaggaactcataatgataatcaggagcgaaagacggagctgccccgggagcatgccaatagcaagcaggaagaagataacactcaaagcgacgacattctggaggaatcagatcagcctacacaggtcagcaagatgcaagaagacgaatttgaccaagggaaccaagaacaagaagataacagcaacgcagagatggaagaagaaaatgcatctaacgttaataaacacatccaagagaccgagtggcagtcccaggaaggtaaaactggactggaggcaatctcaaaccataaggaaacagaagaaaagaccgtgtccgaagccctgctgatggaacctaccgacgacggaaacacaactccaagaaaccacggagtagacgacgatggtgacgacgatggtgatgacgggggtacagacggaccacggcattcagctagtgatgactactttatcccctcacaggcatttttagaggccgaaagggcacaatctatcgcttaccacttgaagatcgaagagcagagagagaaagtgcacgagaacgagaacattggtacaactgagcccggcgagcaccaggaggcgaaaaaggccgagaattcctccaacgaagaagaaacaagttccgaaggtaacatgagagtgcacgcggttgattcctgcatgtcctttcaatgcaagcgagggcacatctgcaaggctgaccagcaaggaaaaccgcactgtgtgtgccaggaccctgttacttgccccccaactaagccattagatcaggtatgtggcaccgacaaccagacctatgcctcctcatgtcatctcttcgctactaagtgtcgcctcgaagggaccaagaaaggccaccaacttcagttagactacttcggcgcctgcaagtccattccaacctgtacagatttcgaagtgatccagttcccacttcgcatgagggactggctcaaaaacattttgatgcaactctatgaagccaactcagagcacgcgggatatttgaacgaaaaacagaggaacaaagtgaaaaaaatctatctcgacgagaaacgcctgctagccggcgatcaccctatcgacttgcttttgagagactttaaaaagaattatcacatgtatgtctacccagtacactggcaattttcagaacttgatcagcatcccatggatcgagtgctcacacattccgaactggcccccctgcgagctagccttgtgccgatggaacattgtattactagattttttgaagaatgtgatccgaataaagataagcatattacactgaaagagtgggggcattgttttggaattaaagaagaggacattgacgagaatcttctgttttag

SEQ ID NO: 14815 - RNA, 591 nt, synthetic construct
  misc_feature 1..591: note = source = /note="Description of Artificial Sequence: Synthetic coding sequence"
  source 1..591: mol_type = other RNA
atgcctcatttagccagcttatttactgcctcctccagatgctgcccgcatccactgagacctgaaggttcaggggccatgggtcccgaagccctgtcaagtctgctgctgttgctcctggttgcctctggtgatgcagatatgaaaggccacttcgatcctgcaaaatgtcgatacgccttgggaatgcaagaccgtaccattcccgactcagacatttccgcgtccagctcatggagtgactcaactgccgcacggcactctcgattagagtcttctgatggagatggggcctggtgcccagccggcagcgtgttccccaaggaagaggaataccttcaagtggatctacagcgtctgcacctggtggccctcgttggcacacagggacgccatgcaggtggattgggcaaggagttttctcggtcataccgtctaagatattcccgcgatggtagaagatggatgggttggaaggatagatggggacaggaagtgatcagcggaaatgaggaccctgaaggagtagttctgaaggatttgggaccacctatggtagctcgtttggtgcgcttctaccccagggcctag

SEQ ID NO: 14816 - RNA, 162 nt, synthetic construct; identical to SEQ ID NO: 13177
  misc_feature 1..162: note = source = /note="Description of Artificial Sequence: Synthetic coding sequence"
  source 1..162: mol_type = other RNA

SEQ ID NO: 14817 - RNA, 126 nt, synthetic construct; identical to SEQ ID NO: 13178
  misc_feature 1..126: note = source = /note="Description of Artificial Sequence: Synthetic coding sequence"
  source 1..126: mol_type = other RNA

SEQ ID NO: 14818 - RNA, 222 nt, synthetic construct; identical to SEQ ID NO: 13179
  misc_feature 1..222: note = source = /note="Description of Artificial Sequence: Synthetic coding sequence"
  source 1..222: mol_type = other RNA

SEQ ID NO: 14819 - RNA, 369 nt, synthetic construct
  misc_feature 1..369: note = source = /note="Description of Artificial Sequence: Synthetic coding sequence"
  source 1..369: mol_type = other RNA
atgggtcccgaagctctgagctcattgctactgctgctactcgttgcgtcaggtgatgccgatatgaaggggcactttgaccccgctaagtgccgttacgcactgggcatgcaggaccgcacaattccggatagcgatatttccgcctcctcatcctggagcgacagcaccgccgctagacactcgaggttggaatctagtgatggggatggggcgtggtgtccggccggcagtgttttccctaaagaagaagagtacctccaagtcgacctgcagagactccaccttgtggctttagtcggaacacaggggcgtcacgctggggggttgggaaaagagtttagtaggtcttacagattaaggtattag

SEQ ID NO: 14820 - RNA, 483 nt, synthetic construct
  misc_feature 1..483: note = source = /note="Description of Artificial Sequence: Synthetic coding sequence"
  source 1..483: mol_type = other RNA
atgggacctgaagccctgtcaagtttgctgctactcctactggtcgcatccggagatgctgatatgaaaggccattttgacccggcaaagtgtcgctatgcactgggaatgcaggacagaacaatacccgacagcgacatttctgcatcatcttcctggagcgattcgaccgcggctcgtcactcaaggctggagtcctcagacggagacggggcctggtgtcctgcaggatccgtgttccccaaagaggaggagtaccttcaggtggacctacaacggctccatctcgtagcactggtcggtacccagggacgccacgctggaggccttggtaaggagttctccaggtcctacaggctgagatattctagagacggtcgcagatggatgggatggaaagatcgttggggccaagaagtgatatccggaaatgaagaccccgagggagtagtactaaaggatctgggtccccccatggtgtag

SEQ ID NO: 14821 - RNA, 540 nt, synthetic construct
  misc_feature 1..540: note = source = /note="Description of Artificial Sequence: Synthetic coding sequence"
  source 1..540: mol_type = other RNA
atggggtctagtggactgctttccttattggttctgttcgtgctcttggccaacgtgcagggtcccgggctgaccgattggttattccccaggaggtgcccgaaaataagagaggagtgcgaatttcaggaacgagacgtgtgtactaaagatcgccagtgtcaagacaataaaaaatgctgcgtattcagttgtgggaagaaatgtctggatctcaagcaagatgtatgtgaaatgcccaaagaaaccggcccatgtctcgcttacttccttcattggtggtatgacaagaaagataacacgtgttcaatgtttgtctacggggggtgtcaaggaaacaataataactttcaaagcaaggccaactgtcttaatacttgtaagaataaacagccctgcccaaagatcaaagtggagtgtgaggtcgaggagatagatcagtgcaccaagccaagagattgtccggaaaatatgaaatgttgcccattcagcaggggcaagaaatgtttagacttcagaaaagcaagcctcagtacttag

SEQ ID NO: 14822 - RNA, 438 nt, synthetic construct
  misc_feature 1..438: note = source = /note="Description of Artificial Sequence: Synthetic coding sequence"
  source 1..438: mol_type = other RNA
atgttatttaggaaccgattcctgcttctgctcgcccttgccgcacttctggctttcgtgtcactttccctacagtttttccacttgatccccgtgtcgactcccaagaatggaatgtccagtaaatccaggaagagaattatgccggaccccgtgactgagcctcccgtgaccgaccccgtttatgaagctctgctctactgtaatattccctctgtagctgagagaagtatggaaggacatgccccacaccactttaagctggtttccgtccacgtattcatccgccacggtgacaggtaccctctctacgtgatccctaagactaagcgacccgagattgattgtacccttgtggctaatcggaaaccatatcaccccaaactcgaagcttttatttctcacatgtcaaaaggtagtggagcctcttttgaatag

SEQ ID NO: 14823 - RNA, 399 nt, synthetic construct
  misc_feature 1..399: note = source = /note="Description of Artificial Sequence: Synthetic coding sequence"
  source 1..399: mol_type = other RNA
atgggacctgaggcactgtcaagtctgttgctactgctactcgtcgcctccggggacgccgacatgaagggccattttgaccccgccaaatgccggtatgccctaggtatgcaggataggaccatccccgattccgatatatcagcttcctcatcatggtccgactcaaccgcagcccgccattcaaggctggagagctccgatggggacggtgcatggtgccccgccggctcagtctttcccaaggaagaggaatatttgcaagtggacctgcagagactgcatcttgtggcgctcgtggggacacagggtcgacacgctggcggacttgggaaggaatttagtaggtcataccgcctgagatacagcagggacggccgcagatggatgggatggtag

SEQ ID NO: 14824 - RNA, 306 nt, synthetic construct
  misc_feature 1..306: note = source = /note="Description of Artificial Sequence: Synthetic coding sequence"
  source 1..306: mol_type = other RNA
atggggcccgaggccttatcatcacttcttttactcctcttagttgcctctggtgacgcagacatgaaaggtcattttgacccagctaaatgccgatacgcacttggaatgcaggacagaaccataccagacagcgacatcagcgcatcatcctcttggtctgactcaaccgcagcaaggcactctcgtctggaaagtagcgacggcgatggagcctggtgtcccgccggaagcgtgttcccaaaggaggaggagtacctgcaagtcgaccttcagcgccttcatctcgtggcactcgtggggtag

SEQ ID NO: 14825 - RNA, 393 nt, synthetic construct
  misc_feature 1..393: note = source = /note="Description of Artificial Sequence: Synthetic coding sequence"
  source 1..393: mol_type = other RNA
atgctggccccactttttctgtgctgtttgagaaatctgttcaggaagcttatttccttccagcccccccagttaggtcgaactaacatgcattatagcaagctcccacgcaccgccatcgaaacagaatttaagcaaaacgtcgggccccccccgaaggatctcactgccgaagtctattttccctccattaagtcccgctctcacctccccgccgtgttttataatcagtatttcaagcatcccaaatgcgtcggagagtatgggccgaaaaacggagctgaacgccagatcgaggaaagaaaagtattgccgacaactatgatgttctccatgctcgccgactgcgtcctgaagagtactcccatacctattcttggtgttgccatgtag

SEQ ID NO: 14826 - RNA, 420 nt, synthetic construct
  misc_feature 1..420: note = source = /note="Description of Artificial Sequence: Synthetic coding sequence"
  source 1..420: mol_type = other RNA
atgcccgcgatcgccgtcctcgctgccgctgctgccgcatggtgtttccttcaggtagaaagccgtcatttagacgctctcgcaggcggagccgggccaaaccacggcaattttttggacaacgaccaatggctctccaccgtttcgcagtacgaccgggacaagtactggaaccgatttcgcgatgatgattactttaggaactggaacccaaacaagccctttgaccaggccctcgatccctctaaagatccctgtctgaaggtgaagtgctccccccacaaagtgtgcgtgactcaggattaccaaacagccttatgtgtctcgcgcaaacacctcttaccccggcagaagaaaggaaatgtcgcacagaagcactgggtgggaccatctaacctcgtcaagtgtaagccttgttag

SEQ ID NO: 14827 - RNA, 510 nt, synthetic construct
  misc_feature 1..510: note = source = /note="Description of Artificial Sequence: Synthetic coding sequence"
  source 1..510: mol_type = other RNA
atgagactcttgatactgacgtgtcttgtggctgtggccctcgctcggcctaagcttcccctccgataccctgaaaggctccagaacccatccgagtcgagcgaacctatccccctagaatcccgagaggagtacatgaacggaatgaaccgacaaaggaatatcctgagggagaaacagacagacgaaattaaaaactgcgtagttgccgaaccagaaaagatggaatcatctatcagttcttcctccgaagagcagttctgcagactgaatgagtacaatcagctgcaattgcaagcagctcatgcgcaggagcagattcgcaggatgaacgaaaatagccatgtgcaggttccttttcaacagctaaaccaactggccgcctacccttatgcagtgtggtactaccctcaaattatgcaatacgtaccctttccacccttcagtgacatatctaacccgaccgctcacgaaaactatgaaaaaaacaacgtgatgcttcagtggtag

SEQ ID NO: 14828 - RNA, 921 nt, synthetic construct
  misc_feature 1..921: note = source = /note="Description of Artificial Sequence: Synthetic coding sequence"
  source 1..921: mol_type = other RNA
atgaagaaagatgaaccaccacttgacttccccgacaccctagaaggcttcgagtacgcttttaatgaaaaaggccaactacgccacataaagacgggtgaaccattcgtgttcaattatcgagaggatctgcaccgttggaaccaaaaaagatatgaggcgctgggcgagataattacaaaatacgtgtatgaactgctggagaaggactgcaacctgaagaaagtctcaatccctgaaggttacggggttatcgtgctcaatccgaatgagaattatatagaggttgaaaaacctaagattcacgtccagtcatcgtcagactcatctgatgaaccagcggagaaaagggaaagaaaagataaagtgagtaaggagactaaaaaacggcgagacttctatgaaaagtaccggaacccccagagagagaaggagatgatgcagttgtatattagagagaatgggtcccccgaagaacacgctatttatgtctgggaccacttcatcgctcaggccgccgccgagaatgttttttttgtagcacacagttatggtggattagccttcgtggagctcatgattcagagagaggccgatgtaaagaacaaggtcaccgccgttgcactcaccgattccgtgcataatgtttggcaccaggaagcagggaaaaccatcagggagtggatgcgagagaattgttgcaattgggtatcaagctctgaacctctcgacacatccgtggagtctatgttgcccgactgcccaagagtgtcagctgggactgatcgacacgagctcactagctggaagagctttccttcaattttcaagttctttaccgaggcctcagaagcaaaaacctcctcactcaaacctgccgttacaagaaggtcacatcgaattaaacacgaagaactttag

SEQ ID NO: 14829 - RNA, 2862 nt, synthetic construct
  misc_feature 1..2862: note = source = /note="Description of Artificial Sequence: Synthetic coding sequence"
  source 1..2862: mol_type = other RNA
tgacagctttgttggttgccactacttgctcctctcttgctcttgagaccacctggcgttcagtctgccgggccaattcgggccttcgttgtccctcactcgcacatggatgtcggttgggtgtacaccgttcaagagagcatgcgggcctatgctgccaatgtttacacatcagtcgtggaggaactggcacgaggacaacaacggaggtttatcgccgtggagcaggagttttttagattgtggtgggacggggtggcttcagatcagcaaaaatatcaggtgcggcagttactggaggagggtcggttggagtttgttatcgggggacaggtaatgcatgacgaggctgtgactcacctggacgatcaaatcctacagctcaccgaaggacatggctttctgtacgagacatttggaatcaggccacagttttcgtggcatgtcgacccttttggggccagcgccacaacccctactctgtttgcccttgccggattcaacgcccatttaggctccaggattgattatgacctcaaggctgccatgcaagaagctcgaggattgcagtttgtgtggcgcggatctccttccctgtctgagcgtcaggaaatttttactcatattatggaccagtattcctactgtacgcctagtcatattccttttagcaataggtcaggcttctattggaacggagtcgcagtgttccccaaacccccgcaggatggtgtatatccaaatatgagcgagcctgtaacccccgcgaatataaacctctatgccgaggcgctcgtagcaaacgtcaaacagagagcagcctggtttcgaaccccccacgtgctctggccctggggttgcgacaagcagtttttcaacgcgagtgtccaatttgcaaacatggacccacttcttgaccatattaactcacacgcggcagaactcggagtttcagtccagtacgccacacttggtgattactttcgcgccttgcacgcattgaatgtcacatggagagtcagagatcatcatgacttcttgccctacagcactgaaccattccaggcatggacgggtttttatacttctaggtcctcactaaagggcttagccaggcgagcctccgccctgctttatgcgggagagtctatgttcaccagatatctctggccagctcctcgcggccacctggatcctacttgggcactccagcagttacaacagcttcggtgggcagtgtctgaagttcaacatcacgatgccatcactggaaccgagtcacccaaggtgagggacatgtacgctacgcacctagcctccggtatgttaggaatgagaaaactgatggccagcatagtgttagacgagctacaacctcaggcacccatggctgcttccagcgatgccggacctgccggccactttgcaagtgtttacaatcccttagcctggaccgtgacaactatagtgacattaacggtgggcttcccgggggttagggtgaccgacgaagccggccatcccgttccgtcacagatccaaaactcaacagagactccttctgcttacgaccttctcatcttgactactatcccaggcttgtcttatcgacattacaacattagacctacagctggcgcgcaggagggaacacaagaacccgcagctaccgtggcgtccaccttgcagtttgggcgcaggcttcggaggaggacttcccacgcaggccgttacttagtcccagtcgccaatgattgctacattgtgttactcgaccaggataccaatttgatgcactctatttgggaacggcagagcaacagaacagtcagggttacacaagagttccttgaatatcatgttaacggagatgtgaagcagggcccgattagcgacaactacctttttaccccaggcaaagctgcagtgccagcatgggaagctgtcgagatggagatcgtcgctgggcagttagtcaccgagatcagacaatacttctaccgcaatatgactgcccagaattatacatacgccatccggtcacgcctgacccacgtgccccagggacatgacggagaactgctatgccacaggatcgagcaggagtatcaggccgggcccttggagctaaatagagaggctgtcttacgaaccagtactaacctcaacagccagcaggtgatttactcagacaataatggataccagatgcagcgacggccatatgtgagctacgtgaataatagtattgcacggaattactatcctatggtgcagagcgcttttatggaagatgggaaaagcagactcgtgctgctctctgaacgggcacacggcatttcaagtcaaggaaatgggcaggttgaagttatgctccacagacgtctttggaacaattttgactgggacttaggctacaatttaaccctcaatgacacttccgtcgtccaccccgttctttggttgttgctgggaagttggagcctgacaacagccttgaggcaacgatccgcactggcgcttcagcataggcctgtcgttctcttcggcgacctagccggaaccgcacccaaattaccagggcctcagcaacaagaggcagttactctaccacccaatcttcatcttcagattcttagtattcccggctggcgctactcaagcaatcacactgaacattcgcaaaatttgaggaaaggacaccgcggagaagctcaggccgatctccgcagagtcctactacgtttgtaccacctctacgaagttggtgaagacccagtgctatctcagccagtgacagttaatttagaggtcaacttccccaccccgattcaaaccatctcccagggcagcaaaccctag

SEQ ID NO: 14830 - RNA, 459 nt, synthetic construct
  misc_feature 1..459: note = source = /note="Description of Artificial Sequence: Synthetic coding sequence"
  source 1..459: mol_type = other RNA
atgcgattcaagactactgccaaggatggacttctgctctggaggggggattcaccaatgagaccaaactccgattttatatctctgggcctgcgggatggagctctcgtgttttcttataatctcggatcaggagttgcatctattatggttaatggaagttttaatgacggtagatggcacagggtaaaagctgttcgtgatggtcagagcgggaaaattactgtggacgattacggggctcgcacaggcaaaagtccggggatgatgcgacagctgaacattaatggtgctctctacgtcgggggcatgaaagaaatcgcccttcacaccaacagacaatatatgagaggactggtaggctgtatctcacactttaccctgagcacggattatcacataagtctcgtggaggatgcagtggacgggaagaacatcaacacttgcggagcgaaatag

SEQ ID NO: 14831 - RNA, 1701 nt, synthetic construct
  misc_feature 1..1701: note = source = /note="Description of Artificial Sequence: Synthetic coding sequence"
  source 1..1701: mol_type = other RNA
atggactttctcctggccctggtattggtatcctccctctacttacaggctgcagctgagtttgacggtcgttggccgagacagatagtttcttctattggtttgtgcagatatggggggcgcattgattgttgctggggctgggcgcgccagtcatggggtcagtgccagcccgtgtgtcaaccgagatgcaaacacggagagtgcataggacccaataaatgcaagtgtcaccctggctatgccggaaagacatgcaatcaagatgaacatatccccgcccctcttgaccaaggttctgaacagccattgttccaacccttagaccaccaagcgacctccctgccttctcgagatctcaatgagtgtgggttgaagcctaggccttgcaagcacagatgtatgaatacgtatggctcttacaaatgttactgcctaaacggatatatgctcatgccagatggatcgtgtagctcagccttgacttgttctatggctaactgtcagtatggttgtgacgtggtgaaaggccagattcgctgccaatgtcctagcccaggcctccaactagcccctgatggacggacgtgtgtggacgttgacgagtgcgctaccggtcgggcttcttgtcctcgctttcgacagtgcgtaaacaccttcggttcctatatatgcaagtgtcacaaggggtttgaccttatgtatattgggggaaagtatcaatgccatgacatcgacgaatgtagcttgggccagtatcagtgcagttccttcgcaagatgctacaatatacgaggatcttataagtgcaaatgcaaggaaggttaccaaggagatgggcttacatgcgtttatattcccaaggtgatgatagagccatcagggccaatacatgtccctaagggcaacggaaccatcctgaaaggcgacacagggaataataattggatacctgacgtaggaagtacatggtggcctcctaagactccgtacatacctccaatcatcaccaaccgccccaccagcaaaccaacaacccgaccaactcctaaaccaacccccatacccacccctcctcccccgccacccctgccaactgaacttcgtacgcccctgcctcctaccacaccagagcggcctactactggactaacaaccatcgccccagctgcatctactcctcctggtggcattactgtagacaatagagtgcaaaccgacccccaaaagccacgaggagatgtcttttctgtattagtgcactcgtgcaattttgaccatggcttgtgtggatggatcagggagaaggataatgacttgcattgggaacccattagggacccggccgggggacagtatcttaccgtatcagccgcgaaagcgcccggaggaaaagccgccagacttgtgttgccactgggccgacttatgcatagtggcgatttgtgtctcagcttccgccacaaagtgacaggcctacattcagggacactgcaggtgttcgtgcggaaacacggggcgcacggggctgcattgtggggcagaaatggtggacatggctggaggcagacacagattactctacggggagcggatatcaagtcggtggtatttaagggtgaaaaacggagggggcatacaggagagatcggactggacgatgtttctttgaagaaaggacattgttccgaagaaagatag

SEQ ID NO: 14832 - RNA, 213 nt, synthetic construct; identical to SEQ ID NO: 13193
  misc_feature 1..213: note = source = /note="Description of Artificial Sequence: Synthetic coding sequence"
  source 1..213: mol_type = other RNA

SEQ ID NO: 14833 - RNA, 237 nt, synthetic construct; identical to SEQ ID NO: 13194
  misc_feature 1..237: note = source = /note="Description of Artificial Sequence: Synthetic coding sequence"
  source 1..237: mol_type = other RNA

SEQ ID NO: 14834 - RNA, 339 nt, synthetic construct
  misc_feature 1..339: note = source = /note="Description of Artificial Sequence: Synthetic coding sequence"
  source 1..339: mol_type = other RNA
atgagattcaaaacaaccgctaaggatggactgttattgtggaggggagactcacctatgcgcccaaattcagattttatttccctgggcctgagagatggcgctcttgtgttctcctacaaccttgggtctggtgtagcttctattatggtgaacggctcctttaatgacggacgatggcacagggttaaggcagttagagacggacagtccggtaagatcacagtcgacgactatggagctcgtaccggcaagtctccaggaatgatgaggcaattgaacatcaatggtgccttgtacgtcggaggcatgaaagagatcgcactacacactaattag

SEQ ID NO: 14835 - RNA, 2685 nt, synthetic construct
  misc_feature 1..2685: note = source = /note="Description of Artificial Sequence: Synthetic coding sequence"
  source 1..2685: mol_type = other RNA
atgtctttgcctcgctgctgtccacatccactgcgaccggaaggaagcggtgccatgggccccgaagccctctcctccctgctcttattactccttgtcgcatccggggacgctgacatgaaaggtcattttgaccccgccaagtgccgatatgccctgggaatgcaggatcgtaccatccctgacagcgacatttcagcttcttcctcatggagtgatagtaccgccgccagacacagtcgcctcgagtcttctgacggtgatggggcctggtgcccggcaggatcagtctttccgaaagaagaggaatatttacaggtggatctccaaagactgcatctggttgcactcgtagggacccaaggacggcacgcaggtggactgggtaaggagttcagcaggtcctataggcttcgctactcaagggacggccgccggtggatgggctggaaggataggtggggtcaagaggtgatatctgggaacgaagatcccgagggagtcgtattgaaggacctgggaccacctatggtagctcgactggtacgtttctacccgagagcagatagagtgatgtcggtctgcctcagagtcgaattgtatggctgtctgtggagagacgggctgctgtcatacaccgcacctgtggggcaaacaatgtacctaagcgaagccgtctacttgaacgattcaacatatgatggtcataccgtgggaggtctgcaatacggaggattaggacaactggcagatggcgtggtcggcctggacgatttccggaaatctcaggagctgcgcgtgtggccgggttacgactatgtgggctggagcaaccacagcttttccagtggctatgtggaaatggaattcgaattcgataggctgagggctttccaggcaatgcaggtacattgcaacaatatgcacacactgggcgctcggctccctggaggcgtggaatgcagatttagacgtggccccgcaatggcttgggaaggggaacctatgagacataacctgggaggtaacttgggcgaccctcgtgccagggctgtgtctgttccactaggcggaagggttgcacgattcctgcagtgccgcttcttgttcgccggaccctggctgctgtttagcgaaattagttttatcagcgatgtggttaataactcatcaccagctttgggaggtactttccctccagcaccatggtggccaccagggccaccacccactaacttttcctcgctcgaattggaaccccgaggtcagcagcctgttgctaaagctgaaggatcacctactgccatcttaatcggctgcctggttgccattatcctgttgttactgttaattattgctctcatgttatggcggctgcattggcggcgcctgttgtccaaagctgagcgccgggtcctcgaagaagagctgaccgttcacctgagcgttccaggagacacaattctcattaataaccgcccaggtccccgagagcctcccccgtatcaggagccaaggcctagaggcaatccaccacatagcgcaccttgtgtgcctaatggaagtgcgtactccggcgactatatggagcccgagaagcctggcgcaccactgctgccccctcctccccaaaatagtgtgccacattatgctgaggctgacattgtgaccctccaaggtgtgacggggggcaatacatacgccgtacctgctttgccgcccggtgccgtaggagatggaccgccacgagtggacttcccaagaagcaggctgagatttaaagagaaacttggtgagggccagtttggcgaggtccatctgtgcgaagtggattcacctcaggacttggtttctttggatttcccactgaacgttaggaaagggcacccactgctggtggctgtaaaaattctgagacccgatgcaactaagaatgctcgtaacgatttcttgaaagaagttaagatcatgtctcgattaaaggaccctaatattattcgacttcttggcgtctgcgttcaggatgaccccttatgcatgataaccgactacatggagaatggcgatctgaaccaatttctgagtgctcatcagctggaggacaaggctgcagagggggcaccaggcgatggtcaggcagctcaaggacctactatcagctatccgatgttgttacatgttgctgctcagatagcgagtggaatgcggtatttggcaacactgaacttcgtgcaccgcgatctcgccacaagaaactgtctcgtcggagagaattttactatcaaaatagccgatttcggaatgtctaggaacctttatgccggcgattattatcgggttcaggggcgcgctgtccttccaatccggtggatggcctgggaatgcatcttaatgggtaagtttaccacagcctccgacgtatgggcttttggtgtgacactgtgggaagtcttgatgctatgcagagcacaaccttttggccaattgacggatgaacaggtgattgagaacgccggagaattttttagagatcaggggcgccaggtctatctttcccgtccgcccgcatgcccacaagggctgtatgaactgatgctccggtgctggtctagagaaagcgaacagagaccccccttcagccagctgcacagattcctggccgaggacgctctgaacacggtttag

SEQ ID NO: 14836 - RNA, 384 nt, synthetic construct
  misc_feature 1..384: note = source = /note="Description of Artificial Sequence: Synthetic coding sequence"
  source 1..384: mol_type = other RNA
atgggacccgaggccttgagttccctgctgttactcttactcgttgcctccggtgatgccgatatgaagggccatttcgatcccgcaaagtgcagatacgcactggggatgcaagatagaacgatacctgatagtgacatatctgcctcatccagttggtcagacagtacagcggcaaggcatagccgcctggagagctccgacggcgatggagcatggtgcccggccggatctgtgtttcctaaggaagaggagtacctgcaagtagatctgcagagattacaccttgtagcacttgtcggaacgcaaggcaggcacgcgggcggactgggcaaagaattctcgaggtcgtacaggctgagatactcaagggatggaagatag

SEQ ID NO: 14837 - RNA, 1113 nt, synthetic construct
  misc_feature 1..1113: note = source = /note="Description of Artificial Sequence: Synthetic coding sequence"
  source 1..1113: mol_type = other RNA
atgaagaaagacgagcctcccctggactttcccgacactttagaaggatttgagtacgccttcaacgagaaaggacaactgagacatattaaaaccggagagccgttcgtgtttaactatcgcgaagacctgcaccgttggaaccagaaaagatacgaggccctgggcgaaattatcacaaaatacgtatatgagctactcgaaaaggattgcaatctcaagaaggtttccatcccagtagatgccaccgagtccgaaccaaagagtttcattttcatgagtgaagatgccctgactaaccctcagaagcttatggtgcttatccacggttctggggttgtaagggcgggacaatgggccaggcgtctgattatcaatgaggaccttgattccggcacacagattcccttcataaaacgcgccgtcgcggaaggatacggggtgatcgtgctgaatccaaacgaaaattatattgaggtggaaaaacctaaaattcacgtccagtcaagcagtgatagtagcgacgaaccagcagagaagagagagaggaaagacaaagttagtaaagaaaccaagaaacgaagagatttttacgagaagtatcggaatccgcaaagagagaaagaaatgatgcagctgtacattagggaaaacggaagtcctgaggaacacgctatctacgtgtgggatcatttcatcgcccaggcagccgcagaaaacgtgttcttcgtcgctcactcatacggcggacttgcatttgtagaattaatgatccagagggaggccgacgtcaagaataaagtgaccgccgtggccctcaccgatagtgtgcacaacgtttggcatcaagaagcaggaaaaacaataagagaatggatgagagaaaactgttgcaattgggtgagctcctctgagccacttgatacctctgttgagtccatgttgcccgattgccctagggtatcagcaggaactgaccggcacgaactgacctcatggaagtctttccctagcatattcaaattctttacggaagcttcagaggccaaaacctctagtcttaaacctgcagtaacccgccgaagccaccgcattaaacacgaagagttgtag

SEQ ID NO: 14838 - RNA, 435 nt, synthetic construct
  misc_feature 1..435: note = source = /note="Description of Artificial Sequence: Synthetic coding sequence"
  source 1..435: mol_type = other RNA
atgaaaacagggttattttttctgtgtttgctcgggactgcagccgctatacctaccaatgcccgcttgttgtctgatcattccaagccgactgcagagaccgtggccccggacaacaccgcaattccctccttaagagcagaagccgaagaaaacgaaaaagaaaccgctgtgagtacagaggacgatagtcatcacaaagccgaaaagtcatcagtgctgaagagtaaggaagaaagtcatgagcagagcgctgaacaaggcaagtcaagctcacaagaattggggctgaaggatcaggaggatagcgatggacatctgagcgtcaatttggaatatgcccccacagaaggaacccttgacattaaagaggatatgagcgaacctcaggaaaagaaacttagcgagaacacggatttcttggcaccagggtag

SEQ ID NO: 14839 - RNA, 1341 nt, synthetic construct
  misc_feature 1..1341: note = source = /note="Description of Artificial Sequence: Synthetic coding sequence"
  source 1..1341: mol_type = other RNA
ctgactctccactctctcacgtgttacgaggacctggtcaccttcctccagcagtctattcaccaatttgaagtcggcccctacggttgcattttactcacattatctgccatcctgtcgagatccaccgagcttatccgccaggactttgacgtgcccacgagccatcttattggagcacacggatattgtacccaagaactcgtgaacctgctcctaaccggaaaggcagttagcaatgtttttaatgacgtggtagagctcgactcaggggacgggaacatcaccttactaaggggcatagctgcgcggtcagacattgggtttctcagcctcttcgaacactataacatgtgccaagtagggtgttttttgaaaacgccccgatttccaatatgggttgtctgctctgaatcacatttcagtatcttattctcactgcagccaggactgctgcgagactggcgcaccgaacgactgtttgatctttactattacgacggccttgcgaatcagcaggaacagatccgacttactatcgatactacacagaccatctccgaggacaccgacaatgatctcgtgcctccattagagctgtgtattcgcaccaacatcggttcagccctgggattcaagtaccccgtgggaaacaaccagaccgcagtacaggacaacgtgaaagtatccctggccttcgggctttccattgccaccttagcacaatccgtcggacacatcagcggcgctcacctaaatcccgcagttaccctcggcctactcctttcctgccagatttcgattttccgggcattgatgtacattatcgcacagtgcgtcggagcgatagtcgctaccgcaatcctgagcgggatcacaagctctttaaccggcaacagcctggggaggaatgatcttgcggatggagtcaactctgggcaggggctcggtatcgaaatcattgggactcttcagctcgtgctctgtgttctcgcaacaactgatcggcgtagacgagatttggggggaagtgcccctttagccatcgggctcagcgtggctctgggtcaccttttggccatcgattataccggctgcggaatcaatcctgcacgaagtttcgggtcagccgtaatcacacataattttagcaatcactggatcttttgggttggcccctttattggcggcgcattagcggtgttgatctatgattttatcctggcacccagatccagcgacttgaccgacagagtgaaagtgtggacatcaggacaagtggaggagtacgatctcgacgctgatgatattaattccagagttgaaatgaagcccaagtag

SEQ ID NO: 14840 - RNA, 81 nt, synthetic construct; identical to SEQ ID NO: 13201
  misc_feature 1..81: note = source = /note="Description of Artificial Sequence: Synthetic coding sequence"
  source 1..81: mol_type = other RNA

SEQ ID NO: 14841 - RNA, 348 nt, synthetic construct
  misc_feature 1..348: note = source = /note="Description of Artificial Sequence: Synthetic coding sequence"
  source 1..348: mol_type = other RNA
atgggtcccgaagccctttctagtctgctgttactgctgttagtggcctccggagatgccgatatgaaaggacattttgatccagctaaatgtcgctatgcccttggaatgcaggaccgaacaattcccgattcagacatctctgccagctcctcttggagcgattcaaccgcggctaggcactctcgtctggagtcctcagacggtgatggtgcatggtgccccgcaggatctgtttttcccaaggaagaggagtacctccaggtggatttgcagaggctgcacctggttgccctggtcgggacacaaggacgacatgctggaggtctaggaaaagaatttagttag

SEQ ID NO: 14842 - RNA, 165 nt, synthetic construct; identical to SEQ ID NO: 13203
  misc_feature 1..165: note = source = /note="Description of Artificial Sequence: Synthetic coding sequence"
  source 1..165: mol_type = other RNA

SEQ ID NO: 14843 - RNA, 351 nt, synthetic construct
  misc_feature 1..351: note = source = /note="Description of Artificial Sequence: Synthetic coding sequence"
  source 1..351: mol_type = other RNA
atggtgctactacactggtgtctcctttggttgttgtttcctctgtctagcagaacacagaaactcccaacgagggatgaggaattgtttcaaatgcagatcagagataaggccttcttccacgatagttccgtgatccctgacggcgccgagatttcctcctacctgttccgggacactccaaaaagatattttttcgtcgtagaggaggacaatacacccctgagcgtgaccgttaccccctgcgatgcccctctggaatggaaacttagcctgcaagagctacctgaagacagatccggtgaaggcagtggagatctggaacccttggagcagcagaaacagcaatag

SEQ ID NO: 14844 - RNA, 432 nt, synthetic construct
  misc_feature 1..432: note = source = /note="Description of Artificial Sequence: Synthetic coding sequence"
  source 1..432: mol_type = other RNA
atggggcctgaagcactctcctccttacttctgctgctcctggtcgcatccggcgatgcagatatgaaaggccattttgatccagccaagtgtaggtacgcactgggcatgcaggatagaactatcccagattctgatattagcgccagctcatcctggtcggactccactgcagcaaggcactcacggctagaatcttcagacggcgacggagcatggtgtcctgctgggagtgtttttccaaaagaagaagaatatttacaagtcgaccttcaaagactgcatctcgtggcactggtgggcacccagggtcggcacgccggaggtctcgggaaggaattctctagaagttatagactcagatacagcagggacgggcggagatggatgggctggaaagatcggtgggggcaggaggtaatttcagggtag

SEQ ID NO: 14845 - RNA, 747 nt, synthetic construct
  misc_feature 1..747: note = source = /note="Description of Artificial Sequence: Synthetic coding sequence"
  source 1..747: mol_type = other RNA
atggaattactccaagtgaccatactgttcctgcttccctcgatttgtagttccaactcaactggcgttctggaggcagccaataacagtttagtcgtgaccactacaaaaccttcaattactactcccaatacggaaagtctgcagaagaacgtcgtcactcccaccaccggtaccacccctaagggaactatcacaaatgagctgctgaaaatgtctctcatgtccactgccactttcttgaccagtaaggatgaaggtctcaaagctaccacaaccgatgtgagaaaaaatgacagcattatatcaaatgtcaccgttacttcggttacacttccaaacgcagtaagcacgctacaaagttcaaaacccaaaagctccgtgctccaacccgatgcttctccatctaaaacaggcacactcactagcatcccagtgaccattccagagaataccagccaatcacaagttatcggcaccgaaggtggtaagaatgcctctactagtgcaacctcacggtcctactcctccatcatcctgcccgttgtgatcgctcttatcgttatcacactgtcagtgttcgtgctggtcggattgtatagaatgtgttggaaggcagacccaggaacacccgaaaatggcaacgaccaacctcagtcagataaggaatccgtgaagctgctgacagttaaaaccatttctcacgagagcggagaacacagtgcccaaggaaagaccaaaaactag

SEQ ID NO: 14846 - RNA, 363 nt, synthetic construct
  misc_feature 1..363: note = source = /note="Description of Artificial Sequence: Synthetic coding sequence"
  source 1..363: mol_type = other RNA
atgaagacgggccttttctttctgtgccttcttggcaccgctgctgcgatacccaccaacgctcgcctcttgtcagatcattcaaaacctacagctgagaccgtcgcccctgacaacacagctataccttcactgagagccgaggccgaagagaatgaaaaagaaacggccgtcagcaccgaagatgattcacatcataaggccgaaaaatctagtgtactcaagagtaaggaagaatctcatgaacaatcagccgagcagggaaagtcatcctctcaggagctaggactgaaagaccaggaagactcagacggccacctgtcagtaaacttggaatatgcaccaaccgaaggaaccctgtag

SEQ ID NO: 14847 - RNA, 339 nt, synthetic construct
  misc_feature 1..339: note = source = /note="Description of Artificial Sequence: Synthetic coding sequence"
  source 1..339: mol_type = other RNA
atgggacccgaagccctgagttcgctgctcctgctcttacttgtcgccagcggtgatgctgatatgaaaggccacttcgatccagccaagtgccgctatgcactgggcatgcaagaccggaccattccagacagcgatatttcagcatcctcctcgtggtcagattccacggcagcacgtcactcaaggctagaaagttcagatggagacggcgcatggtgcccagcagggagcgtatttcccaaagaagaggagtatctgcaggtagacctccagcggctgcatcttgtcgcgctggtgggcacacaaggcagacacgcaggaggcttagggaagtag

SEQ ID NO: 14848 - RNA, 513 nt, synthetic construct
  misc_feature 1..513: note = source = /note="Description of Artificial Sequence: Synthetic coding sequence"
  source 1..513: mol_type = other RNA
atgggtcccgaggcccttagcagcctgctgcttctactgttagtagccagcggcgacgccgacatgaaagggcatttcgaccccgccaaatgcaggtacgcccttggcatgcaggataggactatccctgatagcgatatttccgccagcagttcctggtctgactcaacggccgcccgccatagccgcttagagtcttccgatggcgatggagcttggtgtccggccggaagtgtttttcctaaagaggaggagtacttacaggttgatctacaaagacttcaccttgtcgccttagtggggactcagggtcgccatgcgggcggtctgggcaaggagttctcacgtagctatagactaaggtactctcgggacgggcggaggtggatgggatggaaggaccgctggggccaggaagtcatatctgggaatgaagaccctgaaggagttgttttgaaggatttaggccccccaatggtggcaagactggttagattctatccaagggcgtag

SEQ ID NO: 14849 - RNA, 417 nt, synthetic construct
  misc_feature 1..417: note = source = /note="Description of Artificial Sequence: Synthetic coding sequence"
  source 1..417: mol_type = other RNA
atgggacctgaggctcttagctccttactgcttcttcttctggtggcaagtggcgatgccgatatgaagggacacttcgacccggcaaagtgtagatacgcccttggtatgcaggacaggacaattccggacagcgatatctcagcatccagtagctggtctgatagcacagccgcgaggcattctcgattggaatcctctgatggcgacggcgcttggtgccctgccggaagtgtgtttcctaaggaggaagaatatctccaagtggatcttcagcgactgcatttagtggcattggtgggcactcagggacggcacgcgggcgggctaggaaaggagttctcaaggagttacagactgaggtacagccgagatggaaggcggtggatggggtggaaagatcgatgggggcaatag

SEQ ID NO: 14850 - RNA, 285 nt, synthetic construct; identical to SEQ ID NO: 13211
  misc_feature 1..285: note = source = /note="Description of Artificial Sequence: Synthetic coding sequence"
  source 1..285: mol_type = other RNA

SEQ ID NO: 14851 - RNA, 156 nt, synthetic construct; identical to SEQ ID NO: 13212
  misc_feature 1..156: note = source = /note="Description of Artificial Sequence: Synthetic coding sequence"
  source 1..156: mol_type = other RNA

SEQ ID NO: 14852 - RNA, 2760 nt, synthetic construct
  misc_feature 1..2760: note = source = /note="Description of Artificial Sequence: Synthetic coding sequence"
  source 1..2760: mol_type = other RNA
atgggccctgaagccctgtcctcattacttttattgttactggtcgccagcggtgatgctgacatgaaaggccattttgacccagcaaaatgccggtacgccctgggcatgcaggaccgaactatccctgacagtgacatctctgcttcctcttcctggtccgactccaccgccgctagacactctcggttggaaagctcagacggagatggtgcttggtgccctgccggatccgtcttccccaaggaagaagaatacctgcaggtggatctgcagagattgcatttagtcgccctggtagggacacagggccggcacgcgggtggcctcggcaaggagttttcacgatcttacaggcttagatatagtagagatggacgccgctggatgggatggaaagatagatggggtcaggaggtaatctctggtaatgaagatccggaaggagtcgtgctaaaagacctcggaccaccgatggtggcccggcttgtaaggttttatccaagggcagatagggtgatgagcgtgtgtctgagagtagagctctatggctgtttatggcgagacggtttactgagctacacagctccagtcgggcagactatgtatctcagtgaagccgtgtacctcaatgactcaacttatgacggtcatactgtcggggggcttcagtacggtggattgggacaacttgcagacggagtggtcggattagacgatttcagaaaaagccaggagctgcgtgtttggccagggtacgattatgttggatggtccaatcacagcttctctagcggttatgtggaaatggagttcgagttcgatagactccgagcttttcaagccatgcaggtgcactgtaacaacatgcacaccttaggggctcgccttcccggaggggtagaatgccgttttagaagaggccccgccatggcttgggagggcgaacctatgcgtcataatctgggcggcaatctcggagaccctagagcccgcgcagtgagcgtacctcttggtgggcgggtggctcgtttcctacagtgccgattcctttttgccggtccttggctgctatttagtgaaatcagctttattagcgacgtcgtaaacaattcctcaccagccttaggtgggacctttcctcccgccccttggtggccccctggaccacctcccaccaacttcagctctttagaacttgagccaagaggccagcaacctgtagccaaggccgaagggagtccaactgctatcctgatagggtgcctagtcgcgatcattctcttactcctgctcatcattgccctgatgctctggcgcttgcactggcgtcgactgttatcaaaggccgagcgccgcgtgctggaggaagagcttaccgtgcacctgagtgtgcccggagacaccatcttaatcaataatagacccgggccgagagaacctcccccctaccaagagcctagacctcgcggtaacccacctcattccgctccgtgtgtacctaacggctccgccctgttgctctccaacccagcttataggttactgctagcaacatacgcaaggcccccacgcggtcccggccctcctacccccgcttgggctaaaccgacaaacacccaggcctactccggtgattacatggaacctgagaaacccggagcgccacttttgccccctccccctcagaactctgtcccacattatgccgaagcggacatcgtaactctccagggagtgaccggggggaatacatacgccgtcccagctctcccccccggcgccgtgggtgacggcccgccccgtgttgacttcccccggtcaaggcttcgtttcaaggagaaacttggtgaaggccagtttggagaagtgcacttatgcgaggtcgatagcccccaagatctagtcagcctcgacttcccccttaatgtgcgcaaaggacatccactgttggttgccgtgaagatcctccgacctgatgcaacaaagaatgcctccttcagtctcttttccagaaacgacttcttaaaggaagtgaagatcatgagccggctgaaagatcctaatattattagattgctgggtgtttgtgtccaggacgatccactctgtatgatcaccgattacatggaaaatggagatttgaaccaattcctctctgctcaccagctggaagataaagccgccgagggcgcccccggggatggccaagctgcacaaggacctacgattagttatccaatgctgttacatgtagccgcacagatagctagtggaatgcgatacctggccacactgaatttcgtgcatagagatctcgccactcgtaattgcttggtgggagaaaacttcactattaagatcgccgattttggcatgtcgaggaatttgtacgccggggattattaccgagttcagggaagagcagttctcccgatccgatggatggcctgggaatgcattctcatggggaaattcactaccgcttccgatgtctgggcctttggtgtcactctttgggaagtcctgatgctttgtcgagcccagcccttcggccagttgacggatgaacaagtaatcgagaacgcaggcgaatttttccgcgatcaaggtcgccaggtatatctgagtcggcctccggcatgtccgcaggggctgtacgagctgatgctaaggtgttggtccagggaatcagaacagagaccaccattttcacagcttcatcgattcctagcagaagacgcactaaataccgtatag

SEQ ID NO: 14853 - RNA, 318 nt, synthetic construct
  misc_feature 1..318: note = source = /note="Description of Artificial Sequence: Synthetic coding sequence"
  source 1..318: mol_type = other RNA
atgggtgtctcaaagttagacattttgtacagaaggcttctcctcaccaagctgttcatacgcggatgggggcgcccagaagatttgaagaggctgtttgaattcaggaaaatgataggtaacagggaaagatgccaaaacctagtgtcctcggattaccccgtacatatagataagatcgaggagcaatcagattgtaagattcttgacggccattttgtgagtccaatggctcactacgtacccgacattatgcccatcgaaagcgtgatcgccaggttccagtttattgtgcctaaggaatggaatagtaagtag

SEQ ID NO: 14854 - RNA, 126 nt, synthetic construct; identical to SEQ ID NO: 13215
  misc_feature 1..126: note = source = /note="Description of Artificial Sequence: Synthetic coding sequence"
  source 1..126: mol_type = other RNA

SEQ ID NO: 14855 - RNA, 459 nt, synthetic construct
  misc_feature 1..459: note = source = /note="Description of Artificial Sequence: Synthetic coding sequence"
  source 1..459: mol_type = other RNA
atgcgcttcaagactaccgcgaaagacgggttactgctttggcgaggcgacagcccaatgagaccaaacagtgacttcatatctttgggactccgggatggtgccctagttttctcttacaaccttggatcaggagttgcaagcatcatggttaatggttcctttaatgatgggaggtggcacagggtgaaggccgttcgagatggacaaagtggcaaaataaccgtcgacgattacggcgctcgcacagggaagagcccaggaatgatgcgacagcttaacatcaatggggccctgtatgttggcgggatgaaggaaatcgcactccacacaaacaggcagtacatgagggggctggtcggctgcatcagtcacttcacattgtccactgattatcatatctcacttgtagaagacgctgtagacggtaagaatataaatacctgtggtgcaaagtag

SEQ ID NO: 14856 - RNA, 1611 nt, synthetic construct
  misc_feature 1..1611: note = source = /note="Description of Artificial Sequence: Synthetic coding sequence"
  source 1..1611: mol_type = other RNA
atggatttccttcttgctctggttctggtgtcttctttgtatttacaggctgcagccgagtttgatggcagatggccccgtcagatcgtatcttctatcgggttatgcaggtatggaggccgcatcgactgttgttgggggtgggcacgtcagtcctgggggcagtgccagccagtgtgtcaaccaaggtgtaaacacggcgagtgcatcggccctaataagtgtaaatgccacccgggttatgccggcaagacgtgcaatcaggacttaaatgaatgtggtctgaagccaagaccctgtaagcatcggtgtatgaatacttacggatcttataaatgctattgtctgaacggctacatgctaatgcccgacgggtcatgctccagtgcactgacgtgttcaatggccaactgccagtatggttgcgacgttgttaagggacagatacgatgtcaatgcccgtctcccggattgcagctggcaccagacggccgaacttgtgtagacgttgatgagtgcgctactgggcgagcctcctgccctagattccgtcagtgcgtgaatactttcggctcctacatttgcaagtgtcataagggcttcgatcttatgtatatcggtggaaagtatcagtgccacgatattgacgagtgcagtcttggacaataccaatgctcttctttcgctcgctgttataatatccggggttcctataaatgtaagtgcaaagagggataccagggagacggactgacttgtgtgtatattcccaaagtcatgattgagcctagcggcccaatacacgtccccaaaggcaacggaaccattcttaagggcgatacaggaaataataactggattcccgacgttgggtcgacatggtggccacccaagactccttacataccaccgattatcacaaaccgccccaccagcaaaccaacaaccagaccgacaccaaaacctacaccgattccgacacccccaccaccgcctcctttgcccaccgaacttcgcacaccactccctcctactacgcccgagcgcccaacaacaggtttaactacaattgccccagcagcaagcacaccgcccggtggcatcacagttgataatcgcgtgcaaaccgatccacagaagccgcggggagacgtcttttccgtacttgtccattcctgtaactttgaccacggactttgtgggtggatcagagaaaaggataatgatttgcattgggaacctatcagagatcccgcggggggccagtacctcacagtgtccgctgccaaggctccaggtggtaaagccgcacggctcgtgctcccacttggtaggctgatgcacagcggcgacttatgcctctccttcagacataaagtgacgggcctccattcaggaactctgcaggtgttcgttcggaaacatggggcacatggtgctgccctctggggcaggaacggcggccacggatggcgtcagacacagattacgctgcggggggcagacataaagagtgttgtgttcaaaggtgaaaagaggaggggacatacaggggaaattgggctcgatgatgttagtttaaagaaagggcactgtagcgaagagcgttag

SEQ ID NO: 14857 - RNA, 288 nt, synthetic construct; identical to SEQ ID NO: 13218
  misc_feature 1..288: note = source = /note="Description of Artificial Sequence: Synthetic coding sequence"
  source 1..288: mol_type = other RNA

SEQ ID NO: 14858 - RNA, 213 nt, synthetic construct; identical to SEQ ID NO: 13219
  misc_feature 1..213: note = source = /note="Description of Artificial Sequence: Synthetic coding sequence"
  source 1..213: mol_type = other RNA

SEQ ID NO: 14859 - RNA, 417 nt, synthetic construct
  misc_feature 1..417: note = source = /note="Description of Artificial Sequence: Synthetic coding sequence"
  source 1..417: mol_type = other RNA
atgggtcctgaggctctgagtagccttttgctcctgctgctggttgcctccggagatgccgacatgaaaggccactttgatccggcgaagtgccgctacgccttggggatgcaagatcgaacgattcccgatagcgatatttctgctagctcaagctggtcagactcaaccgccgcccgacactctagactcgaatcatctgacggcgacggtgcctggtgcccggctggaagcgttttcccgaaagaagaggagtaccttcaggtggacttgcagagactgcaccttgtggccctcgttggaacacaaggaaggcacgcaggcgggctcggaaaggaattcagccgttcgtacaggcttagatatagcagggatggtcgcagatggatggggtggaaagataggtggggccagtag

SEQ ID NO: 14860 - RNA, 219 nt, synthetic construct; identical to SEQ ID NO: 13221
  misc_feature 1..219: note = source = /note="Description of Artificial Sequence: Synthetic coding sequence"
  source 1..219: mol_type = other RNA

SEQ ID NO: 14861 - RNA, 438 nt, synthetic construct
  misc_feature 1..438: note = source = /note="Description of Artificial Sequence: Synthetic coding sequence"
  source 1..438: mol_type = other RNA
atggtactactgcattggtgtctgttatggctactctttccactatcgagtcgaacccagaaattgcctactcgagatgaggaactctttcaaatgcagatacgagacaaagcctttttccacgactctagcgtcatccctgacggggccgagatctcgagctatctcttcagagacacaccgaagcgctatttctttgtggtcgaagaggataatacccccctgagcgtgacggtcacaccatgcgatgccccgcttgaatggaagctgagcctgcaggagctgccagaggatagatctggcgagggaagtggggacctagagcctctagagcagcagaagcaacaaataatcaacgaagaaggaaccgagctcttctcctataaaggtaatgatgtcgaatactttattagttcatccagtccaagcggcctgtag

SEQ ID NO: 14862 - RNA, 258 nt, synthetic construct; identical to SEQ ID NO: 13223
  misc_feature 1..258: note = source = /note="Description of Artificial Sequence: Synthetic coding sequence"
  source 1..258: mol_type = other RNA

SEQ ID NO: 14863 - RNA, 1410 nt, synthetic construct
  misc_feature 1..1410: note = source = /note="Description of Artificial Sequence: Synthetic coding sequence"
  source 1..1410: mol_type = other RNA
atgctaaaagtacactatcctaaatttggggtctccgaggactgtctttaccttaatatctatgcaccagcccatgcggacactggatctaagttgcctgtattggtgtggttccccggcggagcttttaagaccgggagcgctagcatattcgatgggtctgcactggctgcatatgaagatgtgttggttgtggtagttcagtacagactgggaattttcggattctttaccacttgggatcagcatgccccaggaaactgggctttcaaagatcaggttgccgctctgagctgggtccagaaaaacattgagttcttcggtggtgacccctcatctgtaactatttttggtgagagcgcaggtgccatttctgtatcttctttaattctgtcgcccatggcaaaggggctcttccataaagccattatggaatccggtgttgctatcatcccatatctggaggctcacgattatgaaaaaagcgaggacctgcaggtcgttgcacatttctgtggtaataatgcatccgactctgaggcactcttgcggtgtctgaggacaaaacccagtaaagagcttttgacattgtcccaaaaaactaagagcttcacccgtgtggttgacggagcctttttccccaatgaaccattagaccttttgagccagaaagcattcaaagcgatcccttctataatcggcgtgaacaaccatgaatgtggatttttgctgcctatgaaagaggcacccgaaattctgtccggctccaataaatctttggccctgcatctgatccaaaatatcctgcatataccccctcaatatctgcacctcgttgccaacgaatattttcacgataaacattcccttaccgaaattcgcgattcacttttggacctgcttggggacgtattttttgtcgtaccagcactcatcaccgctagataccatagagacgcaggcgcccccgtgtacttttacgaatttcggcaccgacctcagtgctttgaggatacaaaacctgcattcgtgaaggccgatcacgctgatgaggttcgatttgtgtttggcggcgcatttctaaaaggcgatatagtgatgttcgagggcgctaccgaggaggaaaagttactttcacgtaaaatgatgaagtattgggctacctttgcaaggactggcaaccccaacgggaatgacctctctttatggcccgcctacaacctcaccgaacagtatctgcagctcgacctcaacatgtccctgggccagcgtctcaaagaaccccgcgtcgatttttggacgagcacaatcccgctaatcctgtccgcctcagacatgcttcactcgccactatcctctctaaccttcctctcgttgcttcaaccattcttcttcttctgcgccccctag

SEQ ID NO: 14864 - RNA, 393 nt, synthetic construct
  misc_feature 1..393: note = source = /note="Description of Artificial Sequence: Synthetic coding sequence"
  source 1..393: mol_type = other RNA
atgctgcccttcttgtttttcagcacactcttctcaagcatctttaccgaggcacaaaaacagtactgggtgtgcaattcttccgacgccagtatttcatacacttactgcggacgcgacttaaaacagctgtacttcaatttatatatcaccgtgaacactatgaatctgcccaagagaaaggaggtcatatgtagaggatcagacgacgattacagcttctgtagggcactcaaaggcgaaacagtgaacactactatttctttctcttttaaaggaatcaagttctccaaggggaagtataagtgtgtggtcgaggcaatatctggatcccccgaggagatgctgttctgcttagagtttgtcatccttcatcagcccaattctaactag

SEQ ID NO: 14865 - RNA, 318 nt, synthetic construct
  misc_feature 1..318: note = source = /note="Description of Artificial Sequence: Synthetic coding sequence"
  source 1..318: mol_type = other RNA
atgaagtgtacagcacgagaatggctgcgcgtaacaacggtgctgtttatggcccgagctatacccgccatggtagttcccaacgcgactcttttagaaaaactactggagaagtacatggacgaggatggagagtggtggatcgccaagcagagaggcaaaagagcaataaccgataacgacatgcagagtattttagatctccataataaactgcggagtcaagtataccctaccgccagtaacatggaatatatgacttgggacgtggaactcgaaagatcagctgagtcatgggccgagtcgtgtctttggtag

SEQ ID NO: 14866 - RNA, 567 nt, synthetic construct
  misc_feature 1..567: note = source = /note="Description of Artificial Sequence: Synthetic coding sequence"
  source 1..567: mol_type = other RNA
atgacaatggtctgccatcgaccagagggattagagcagctcgaagcgcagacgaattttaccaaaagagaactgcaggtgctttaccgcggctttaagaacgagtgcccttccggagttgtaaatgaggatacattcaagcagatatatgcgcagttctttcctcacggagatgcatcaacatatgcccactatctatttaacgcattcgacaccacacagacaggatcagtgaaattcgaggattttgtgactgccctgagtattttgttacgaggtaccgtacatgagaaactacggtggacttttaacctctacgacatcaacaaagatggatacatcaacaaagaggagatgatggatatcgtgaaggctatatatgatatgatgggaaagtatacatatccagtgttgaaagaagacacaccccgccaacatgtcgacgtgttctttcagaagatggacaagaacaaggatggtatagtgaccttggacgaatttcttgaatcctgccaggaggatgataatattatgcggagtttgcagctctttcagaacgtaatgtag

SEQ ID NO: 14867 - RNA, 1275 nt, synthetic construct
  misc_feature 1..1275: note = source = /note="Description of Artificial Sequence: Synthetic coding sequence"
  source 1..1275: mol_type = other RNA
atgcccccatttctgattacgttatttttgtttcacagttgctgtctcagggcaaatggacatctccgagaaggcatgaccttgctgaagaccgaattcgccctgcatctttatcagtctgtagctgcctgcagaaatgagactaactttgttatctccccagccggtgtgtcactccctctcgaaatcttgcaatttggagccgaaggatccaccgggcaacagctcgccgacgcattgggttacacagtccacgacaaacgagtcaaagatttcctgcacgccgtgtacgccactctgccaacctccagtcagggtacagagatggaattagcatgcagcctatttgtacaggtaggcactcctctgtcaccttgctttgtggagcacgtttcatggtgggcgaactcctccctggagcctgcggatctctctgagccaaactcaacagcaatacagacatcagaaggtgcaagccgggagacagcaggcggggggccgtctgaaggacccgggggttggccttgggagcaggtgagcgctgcatttgcacaattggttctggtgtctacaatgtctttccaggggacttggcgtaaaagattttcctccactgatactcaaatccttccctttacttgtgcctacggactggtgctccaggttcctatgatgcaccagacaacagaggtgaactacggacagtttcaagatacagccggacatcaagtaggagtgcttgagcttccttatttgggctcagccgtgtcattattcctggtcctccctcgcgacaaagacacccccctctcccacatcgaaccacacctcacagccagcaccatccatctctggactacctcactgcgaagagcacgcatggatgtattccttccacgattccggattcagaaccaatttaatctcaaatccattctgaacagctggggagtgaccgacttattcgatccattgaaagccaatctcaaaggaatcagcggtcaagacggcttttatgtcagcgaagctatccataaggcaaagatcgaggtcctggaggaaggtaccaaggcctccggtgcaaccgccctactgcttctgaagaggtcacgcattccaatattcaaggctgaccgccctttcatctactttctgagggagcccaacacaggcatcacagtgttttttgatcggatacagattatctaccagtgcctgtcttcaaataaaggttcattcgtccattacccacttaaaaataaacatagcttctag

SEQ ID NO: 14868 - RNA, 1815 nt, synthetic construct
  misc_feature 1..1815: note = source = /note="Description of Artificial Sequence: Synthetic coding sequence"
  source 1..1815: mol_type = other RNA
atggccgtactggtttgtccggctagctgccacggcctaaaagaattccgcatacgacgaggaatgtggcgattgtgcctggtttattacttctaccctgcaagcagcacactctacgtcctgaggatagatgtcctaaactataccagtaaggacgaaggaccctctgccgaaggcccccagagaaatacccgtctaggatggatccagggcaaacaggtgaccgtgttaggcagccccgtcccagttaacgtgtttttgggagtgcctttcgccgctccccctttaggatccctgaggttcacgaacccacaacctgcctcaccctgggacaacctgcgagaggctacttcctatccaaacctgtgcctccaaaactccgagtggcttctgctagatcaacacatgctcaaggtacattatccaaaattcggcgtatcagaggactgtctttacctgaacatttacgctcctgctcacgccgacacaggctctaagctcccggtgttagtttggttccctgggggggcctttaagacaggtagtgcaagcatattcgacggatccgctctggcagcttacgaagatgtactggtcgtcgtagtccagtacagattgggtatctttggcttctttacgacgtgggatcagcacgcaccagggaattgggctttcaaggatcaagtagcagcactgtcctgggtgcagaagaacatcgaattctttgggggcgacccgagctctgtcaccattttcggcgaatcagcaggcgcaatctctgtttctagcctaattctaagtcccatggctaaaggacttttccacaaggcgatcatggaatctggggtagccattatcccttacctggaggcacatgattatgaaaaaagcgaggatctgcaagttgtagctcacttttgcggcaataatgcgagtgattctgaggctctgctgcgttgcctaaggactaagccatctaaggaattgctgacgctgagccagaagacaaagtcatttacccgtgtggtggacggagcttttttcccgaacgagccacttgatctcctgtcacagaaagctttcaaggctatcccctcaattattggcgtgaacaatcatgaatgcggattcttgctacccatgaaagaggcccccgagatacttagcgggagcaacaaatccctcgcactgcatttgattcagaacatattacacataccaccacagtacctgcacctggtcgccaatgagtacttccatgacaaacactctcttacagaaatccgcgacagcctgttagacctgcttggtgacgttttctttgttgtccccgctctgattaccgcgcgataccatagggacgcaggtgccccagtgtatttttacgaattccggcatagaccccaatgctttgaggatactaagcccgccttcgttaaagctgaccacgctgatgaggttagatttgtgtttggcggcgccttccttaaaggcgacattgtgatgttcgagggagccacagaagaagagaaacttctgagcagaaagatgatgaaatattgggcaaccttcgcgcgaaccggaaaccccaatggcaatgacctctccctctggccagcatataaccttactgaacaatatctgcagctggacttaaacatgtcactcggtcaaaggctcaaagagccaagggtggacttttggacctcaaccatccctctgattctatccgcttcagatatgcttcactccccattgagttccctgacgtttctctctctccttcagccttttttttttttctgtgccccgtag

SEQ ID NO: 14869 - RNA, 939 nt, synthetic construct
  misc_feature 1..939: note = source = /note="Description of Artificial Sequence: Synthetic coding sequence"
  source 1..939: mol_type = other RNA
atgaatatttggggacaaatttggcccaaggctgtgtatctggtgtgcaactactctccaaaagggaactggtggggtcatgctccgtacaaacacggacgtccctgttctgcctgcccaccatctttcggcgggggatgtcgggaaaacctatgttacaaagagggctcggataggtactatccacctagagaggaagagactaacgagatagagaggcagcaatcccaggttcacgatacacacgttaggacacggtctgatgactcctcccgtaatgaggttattagtgctcagcagatgagtcagattgtgagctgcgaggtaagattaagagaccagtgtaaaggaactacctgcaatcgatacgaatgccctgccggatgcctggattcaaaagcaaaagtgattggcagcgtgcattacgaaatgcaatccagcatttgccgtgccgcgatccattatgggattattgacaatgacggtggctgggtcgacatcacacgtcagggccgtaagcactatttcatcaagtctaacagaaacggtattcagactattggcaaatatcagtccgctaacagcttcactgtgtctaaagttaccgtgcaggccgtgacatgtgagactactgtggaacagctttgcccatttcataagcctgccagccactgccccagggtctactgcccaagaaattgcatgcaagcaaacccccactatgcaagagtgatcggcaccagagtttactcagacctgagctcaatttgtcgagccgccgtccatgccggagtcgttcggaaccatggaggctacgttgatgtaatgcccgttgacaagcgcaagacttacattgctagcttccaaaatggtattttctcggagtctttacagaaccctcctgggggtaaagcttttcgtgtgttcgctgtcgtgtag

SEQ ID NO: 14870 - RNA, 777 nt, synthetic construct
  misc_feature 1..777: note = source = /note="Description of Artificial Sequence: Synthetic coding sequence"
  source 1..777: mol_type = other RNA
atgattgctatatctgccgtgagctcagccctcctcttctccctcctttgtgaagcctcaacagtagttctgctgaactctaccgacagcagccccccaacaaataactttactgatattgaagcagcgctcaaggctcaactggactcagctgacattccaaaggccagacgaaaaagatacatctctcagaacgatatgattgctattttagattatcataaccaggtgagaggcaaggtttttccccctgccgcgaacatggaatacatggtgtgggatgaaaatttggctaaatcagcagaagcttgggcagccacttgtatctgggatcacggtcctagttatctactgagatttctcggccagaacttatccgtaagaacaggtcgctatagaagcatcctgcagctagtgaagccctggtacgacgaagtaaaggactatgcttttccatatccccaggattgtaacccacggtgtccgatgcgatgttttggcccaatgtgcactcactacactcagatggtgtgggctacttctaaccgcattggctgcgcgattcacacctgtcaaaacatgaatgtctgggggtccgtttggaggagggctgtgtacctagtctgtaactacgctccaaaaggcaattggatcggcgaagctccttacaaggtgggagtcccatgttcaagctgccctccatcttatgggggatcctgcactgacaatctttgcttcccaggcgtgacttcaaattacctatattggttcaaatag

SEQ ID NO: 14871 - RNA, 1215 nt, synthetic construct
  misc_feature 1..1215: note = source = /note="Description of Artificial Sequence: Synthetic coding sequence"
  source 1..1215: mol_type = other RNA
atgcccccattcctgataacactgtttctgtttcactcttgttgtcttagggcaaatggtcatctgcgcgaaggaatgacactgctcaaaactgaatttgccttacacctgtaccagtctgtcgccgcatgtcggaatgagaccaatttcgttattagccctgccggggtctccctgcctcttgaaattctgcaattcggggccgaggggagcacaggccaacagctagccgacgccctcggctatacggtccatgacaagagggtcaaagattttctgcacgccgtttacgccaccctgcctacaagcagtcagggaacagagatggaactggcgtgttctctgtttgtccaggtgggtaccccactgtcaccctgtttcgtggagcatgtatcttggtgggctaattctagcctagagcccgctgacctctcagagccgaacagtacagccatccaaacgtctgaaggcgccagccgtgaaacagcaggaggtgggccaagcgaggggcctggcggttggccttgggaacaagtgagcgccgcattcgcgcaactggttcttgtgagcactatgtcttttcaaggaacctggagaaagagatttagctcaaccgacactcaaattctcccatttacttgcgcctatgggcttgtactccaggtcccaatgatgcaccagaccactgaggtgaattacggtcaatttcaggacaccgcagggcaccaagtcggagtgctggaattaccatatttggggagcgctgttagtctctttttggttctcccccgcgacaaagatactcctctttcccacatcgaaccacacctgaccgcttctaccatacacctgtggactacctcacttagacgggcccggatggacgtgttcctccctagatttagaatccagaatcagttcaatctgaaatccattctcaactcttggggcgtaacagatttgtttgatcccctcaaagcgaacctgaaaggtatctcaggacaggacgggttttacgtctctgaagctatacacaaagccaagatcgaagttctcgaggaaggtactaaagcctcaggcgcaaccgcccttttactcctcaaaagaagtcgcatccccatctttaaggccgacagaccattcatttatttcttgagagagcctaataccggatttgtctttagtatcggccgtgtgtctaatccgcttgattag

SEQ ID NO: 14872 - RNA, 936 nt, synthetic construct
  misc_feature 1..936: note = source = /note="Description of Artificial Sequence: Synthetic coding sequence"
  source 1..936: mol_type = other RNA
atgctctatcagaccatcaatagtttgaaaaccaagaatccgaaactcaaaatacttctctctatcggcggctacctcttcggcagtaaaggcttccaccctatggtagattcaagcacatctaggctggagttcatcaattctataattctgttccttcgaaatcacaactttgacggtttagatgtatcctggatttatccggaccagaaggagaatacgcacttcaccgttttgatacacgagctcgccgaagcttttcagaaagattttaccaagtctaccaaagaacgactactcctgacagccggagtttctgcaggacggcagatgatagataattcctaccaggtagagaaattggcaaaagatctcgacttcataaatctcctctcttttgattttcatggatcatgggaaaagcctctcattacaggacacaatagcccacttagcaaaggctggcaagacaggggcccgtccagctattataatgtggagtacgctgttggatactggatccacaaaggcatgccttcagagaaagttgtgatgggcattccaacctacggccacagctttactttagctagcgccgaaaccactgtcggtgcccctgcttccggaccaggagctgccggccctatcacagagtcttctggttttctcgcttattacgagatctgtcagttccttaagggcgcaaaaattactaggctgcaggatcagcaggttccttacgccgtcaaaggtaatcagtgggtgggttatgatgacgtcaagtcaatggaaaccaaagtgcaattcctcaaaaacttgaacctgggaggggcgatgatctggtcaatcgatatggacgactttacagggaaaagctgtaatcagggaccttatcctttggtgcaggctgttaagcgatctctcggaagtttatag

SEQ ID NO: 14873 - RNA, 555 nt, synthetic construct
  misc_feature 1..555: note = source = /note="Description of Artificial Sequence: Synthetic coding sequence"
  source 1..555: mol_type = other RNA
atggcctctgagagactgccgaaccggcccgcatgcttactcgtggcgagtggggccgccgaaggagtgagtgctcaatcttttctacattgctttaccatggcttcaacagcattcaatttgcaggtcgcgactcccggcgggaaggctatggagttcgttgatgtgacagaatccaacgcccgatgggtgcaggacttccgcctcaaggcctacgcttcgcctgcaaagctagaaagtattgacgaacctatttgtgcagtgggacacggcgtcgccgccctctgttgcgctaccaacgaggaccggtcttgggtgttcgactcctatagtctgaccggcccatctgtgtgtgagctagtccgagccccaggcttcgcccgtcttccattggttgtggaggactttgttaaagatagtggcgcctgcttttccgcctcagaacccgatgctgtccatgttgtcctggatcgccaccttgtgaccggccagaacgcctcatccacagtaccagcagtgcagaacctcctttttctttgtggctcccggaaatag

SEQ ID NO: 14874 - RNA, 1257 nt, synthetic construct
  misc_feature 1..1257: note = source = /note="Description of Artificial Sequence: Synthetic coding sequence"
  source 1..1257: mol_type = other RNA
atgcgatcactccttcttctgtcagccttttgcctcctggaggcggctctcgccgctgaagtcaagaagcccgcagccgccgcagctcccggcaccgctgaaaaactctctcccaaggccgccaccctcgccgaaagatccgctgggcttgcattttccctttaccaggctatggccaaggatcaggcagtggaaaatatcctggtctcaccagttgtggttgccagttccctaggcttggtgtccctaggcggcaaagccacaactgccagccaagccaaagcagtgttatccgctgagcagcttagagacgaagaggtgcatgcagggttgggggagctcctgcggagcctgagcaactcgactgccagaaacgtcacctggaaattgggtagcagattatacggaccttctagcgtgagttttgccgacgactttgttcggagttctaagcaacactacaattgcgagcacagcaagatcaactttagagataaacgtagcgcattgcaaagcatcaacgaatgggccgcccagacaaccgatggtaagttgcccgaagtcactaaggatgtggagagaacagatggggccttactggtgaatgctatgtttttcaaaccacactgggatgagaagtttcaccacaagatggtggacaatagagggtttatggtcactagaagttatacagttggggtaatgatgatgcaccggactggactttacaattattatgatgacgaaaaggagaagcttcaaatagtcgaaatgccacttgcgcacaaactgagcagcttaatcattctgatgccgcaccacgtcgaacctttggaacggctcgaaaagttattgaccaaggaacagctcaaaatctggatgggcaaaatgcagaaaaaagccgtggctatcagtctgcccaaaggtgttgtggaagtgacacacgacctgcaaaagcacctggcgggattaggtcttacagaagcgattgacaagaacaaagccgacctgtcacggatgtctggcaagaaagatctataccttgcctcagtgttccacgccaccgcattcgagctagacacagatggcaacccattcgatcaggacatttacggacgagaggagctaagatcccccaaattattctatgccgatcacccttttatttttctggtgagagatacacaatcaggaagcctgctgtttataggcagattagtgcgacctaaaggagataaaatgagagacgaactgtag

SEQ ID NO: 14875 - RNA, 1425 nt, synthetic construct
  misc_feature 1..1425: note = source = /note="Description of Artificial Sequence: Synthetic coding sequence"
  source 1..1425: mol_type = other RNA
atggaccgtaacccatccccaccaccccctgggcgagacaaggaagaggaagaggaagttgccggaggggactgcatcggctctaccgtgtacagtaaacactggttgtttggagtgctttccggactaattcagatcgtcagcccagagaataccaaaagttcaagcgatgatgaagaacagcttaccgaactcgacgaggaaatggaaaacgagatctgtagagtttgggacatgagtatggacgaggatgttgccctttttttgcaggaattcaacgcacctgacatctttatgggggtgttagccaaatctaagtgcccccgcctgagggaaatctgtgtgggtatactgggtaacatggcctgttttcaggaaatttgtgtatccatttcttcagataagaacctgggccaggttttgcttcactgtttatacgattctgaccctcccactctacttgaaactagtaggttactgctgacatgtcttagtcaagcggaggtggcatctgtgtgggtggagcgcatccaggagcatccggccatttatgactcaatctgttttattatgagtagtagtaccaacgtagacctcctcgtgaaagtcggggaagttgtggataagttatttgatctggacgaaaaactcatgctcgagtgggttcgcaatggtgccgcacagccgctggaccaaccacaggaggaatccgaagaacagcctgttttccgcctggtcccttgcattctcgaagccgcaaagcaagtgcgaagtgagaaccctgagtggttagatgtgtacatgcatattctccaactgctgacaaccgtcgatgatgggatacaggccatagtccattgtcccgacacagggaaagacatttggaatctactattcgatctggtttgtcatgaattctgtcaatccgatgatccacctataatactgcaagaacaaaaaacagtgcttgcctccgtgttctctgtcctatctgccatatatgcgagccagaccgagcaagagtatttgaagattgaaaaagttgacctccccctcatagacagcctcataagagtactgcagaatatggagcagtgccaaaaaaagcccgaaaactccgccgagtcgaacaccgaagagaccaagaggactgaccttacccaggacgatttccacctgaagattctgaaggacatattgtgtgaattcttatcaaatattttccaagctttgacgaaagagaccgtggctcagggtgtcaaagaaggccagctatcaaaacagaagtgtagttcagcttttcaaaatctgttgcctttctatagtccggttgttgaggatttcatcaaaattcttcgcgaagtcgacaaagcacttgccgacgatctcgagaaaaacttcccttccctgaaggtccagacatag

SEQ ID NO: 14876 - RNA, 438 nt, synthetic construct
  misc_feature 1..438: note = source = /note="Description of Artificial Sequence: Synthetic coding sequence"
  source 1..438: mol_type = other RNA
atgttaacacgcttagttttatctgcacatctgtccagtactacaagccctccatggacacatgcggctatttcttgggaactcgacaatgtcctgatgccatctcccagaatctggccacaagtcactcccacaggaaggtcagcatctgttcgaagtgaagggaacacgtcttcgctgtggaatttctccgctggacaggacgttcatgcaattgtgacacgaacgtgtgaatcggttctaagctctgctgtttatactcacggatgtggctgcgtgaggagtgcgaccaatatcacctgtcaatcttcaggccaacagagacaggctgcgcgacaggaggaggaaaacagcatttgtaaggcccacgacagcagggagggaaggctgggatacccattatccgcccatcaaccagggtccggcggtcctaattag

SEQ ID NO: 14877 - RNA, 1728 nt, synthetic construct
  misc_feature 1..1728: note = source = /note="Description of Artificial Sequence: Synthetic coding sequence"
  source 1..1728: mol_type = other RNA
taaatttttggtggctccatccattacttcagagtccccagagagtactggcgagaccgactactgaaaatgaaagcatgcggcttaaacacccttaccacttacgtaccatggaacctgcacgaacccgaaaggggcaaattcgatttcagcggaaacttagacttagaagctttcgtcctaatggccgcagagattgggctgtgggtgatcctgagacctgggccatacatctgtagcgaaatggacttaggaggactcccctcttggctactccaagacccgggcatgcggttgaggacaacatacaaaggatttaccgaagccgtggatctgtattttgaccatctgatgtcccgggtcgtacccttacagtacaaacgcggcgggcccatcattgccgttcaggtagaaaacgaatatggcagctataacaaagacccagcctacatgccctacgtgaaaaaggcactcgaggatcgaggaatcgtggagctgctcctaacttctgataataaagacggcctctctaaaggcattgttcagggcgtcctcgctaccatcaaccttcagtctactcatgagctgcaacttttaactacattcctttttaatgtgcagggaacccagcctaagatggtcatggagtattggaccggttggtttgattcctggggcggaccccataatatcctcgattcaagcgaagtacttaaaacagtctcagccatcgtggatgctggctcatcaattaacctgtatatgttccacggcggtaccaattttggctttatgaacggtgcaatgcatttccacgattacaaatcagacgtaacctcctatgattacgatgcggttttaaccgaagctggcgattacacggcaaagtatatgaaattaagagatttttttggctccatctccggtattccgctccctccgcctcccgaccttctacccaaaatgccctatgaaccgctcacacctgtgttgtatctttctttgtgggatgctctcaaatacctaggcgagcccattaagtctgaaaagcccataaatatggagaatttgcccgtcaatggagggaacggacagagtttcggttacatcctttacgagacgagtattaccagtagcgggatactgtcagggcacgtccacgatagaggccaggtctttgtaaacacagtgtctatcggctttctcgactataaaactacaaagatcgctgttccactgatccagggttataccgttctgcggatactggttgaaaaccggggtcgcgtcaattatggcgaaaatattgacgatcagcggaaaggactaatcggcaacctctatctgaatgactccccattgaagaactttcgaatttactcacttgatatgaaaaagagtttcttccagagattcggtcttgacaaatggtcctctttgcctgaaacgcctactttgcctgcattcttccttggatctctaagcatttcctccactccttgcgacacattcttaaagttggagggatgggaaaaaggcgtcgtgttcatcaacggccaaaaccttggaaggtattggaacattggaccccagaagacactgtaccttcccggaccttggttgtcatcaggaattaaccaggttattgtgtttgaggaaaccatggccgggccagctttgcaattcaccgagacgcctcacttaggaaggaaccagtatatcaagtag

SEQ ID NO: 14878 - RNA, 255 nt, synthetic construct; identical to SEQ ID NO: 13239
  misc_feature 1..255: note = source = /note="Description of Artificial Sequence: Synthetic coding sequence"
  source 1..255: mol_type = other RNA

SEQ ID NO: 14879 - RNA, 744 nt, synthetic construct
  misc_feature 1..744: note = source = /note="Description of Artificial Sequence: Synthetic coding sequence"
  source 1..744: mol_type = other RNA
atgcgttctctgcttttgttatcagccttctgcttactcgaagcagctctggcggctgaagtgaagaaacccgccgccgccgcagcgccaggaacggccgaaaagctgtcgccaaaagcagctaccctggcagaaaggagtgccggactggcattctccctttaccaagccatggctaaagatcaggcagtagagaatattttggtaagcccagttgtagtcgcctcatcccttggactagtttccctgggcggaaaagctacgacagcatctcaggcaaaagccgtgctcagtgcagagcagctcagggatgaggaagtgcatgccgggctgggggagctgctaaggagcttgtcaaactctactgccagaaatgtcacctggaaattgggatcccgcctttacggcccatcttccgtatcattcgccgatgatttcgtccgatcctccaaacagcattataactgtgaacatagtaaaataaactttagagataaacgctctgccctgcagtctatcaacgagtgggctgcacagaccaccgacggaaaattgcctgaagtgactaaggacgtcgagagaaccgatggcgctctgctcgtgaacgccatgttttttaagccgcactgggacgaaaagttccatcacaaaatggtggataacaggggatttatggtaacaagaagctatactgtgggggtgatgatgatgcataggactggattgtacaattattatgattag

SEQ ID NO: 14880 - RNA, 117 nt, synthetic construct; identical to SEQ ID NO: 13241
  misc_feature 1..117: note = source = /note="Description of Artificial Sequence: Synthetic coding sequence"
  source 1..117: mol_type = other RNA

SEQ ID NO: 14881 - RNA, 750 nt, synthetic construct
  misc_feature 1..750: note = source = /note="Description of Artificial Sequence: Synthetic coding sequence"
  source 1..750: mol_type = other RNA
atgcgaagcctgctgttacttagtgctttctgtttgctggaagctgccctcgcggccgaagtgaaaaagcctgctgccgcagccgcgcccggaactgccgagaaactctcacccaaggccgccactttagctgaacgcagcgccggattggcattctcactctatcaggccatggccaaggatcaagctgttgagaacattctggtgtctcctgtcgttgttgccagctcccttgggctcgtttctctcggaggtaaggcgacaactgcatctcaagcaaaagcagtgctctcagcggagcaacttcgggatgaagaggtgcatgccggtctcggggagttactgagatccctgtcgaatagtaccgcacgaaacgtgacctggaaattaggaagtaggctttacgggcccagttcagtatcatttgccgatgacttcgtccggtcgagtaaacagcattacaattgcgagcacagtaagataaattttcgagataagcggagtgctctgcagagcattaacgagtgggccgctcaaaccaccgatggcaaactgccagaagtgactaaagacgtagaaagaactgatggagctcttctggtgaacgccatgttctttaagccacattgggacgaaaaattccaccacaagatggtagataaccggggatttatggtgaccaggagttacactgtaggagtgatgatgatgcataggacgggattgtataactactacgacgatgaatag

SEQ ID NO: 14882 - RNA, 201 nt, synthetic construct; identical to SEQ ID NO: 13243
  misc_feature 1..201: note = source = /note="Description of Artificial Sequence: Synthetic coding sequence"
  source 1..201: mol_type = other RNA

SEQ ID NO: 14883 - RNA, 1002 nt, synthetic construct
  misc_feature 1..1002: note = source = /note="Description of Artificial Sequence: Synthetic coding sequence"
  source 1..1002: mol_type = other RNA
atggtctccaagtcccgctggaagctcctcgcaatgctggcgttagtgctcgtagtaatggtgtggtacagtatcagccgcgaagaccggtacattgaacttttttactttccaataccagagaaaaaggaaccctgccttcaaggggaagctgaaagcaaggcgtctaaacttttcggcaactacagccgcgaccagcccatttttttaaggcttgaagattacttttgggtgaaaactccatcagcatatgaactgccatatgggaccaaggggtctgaggacctgttacttagggtccttgcaataacaagctcctccatccctaaaaacattcagtccttacgctgccggagatgtgttgtcgtgggcaatgggcaccgtttaagaaattcatctctcggggatgcgattaacaagtacgatgtggtgataagactcaataacgctccagtagctgggtacgagggagatgtgggatctaagacaacgatgcggctgttctaccctgagagtgcgcactttgaccccaaagtggaaaataacccggatacactgttggtcctggtagctttcaaagcaatggacttccactggatcgagaccattttgagtgacaagaagcgcgtgcgcaaaggtttctggaaacaaccccctcttatatgggatgttaatccaaagcagatcagaattttgaaccccttctttatggagatcgctgctgacaaactactgtctctaccgatgcaacagccccgcaaaattaaacagaagccaacaacaggcttgcttgctataactctggctctccatctctgcgacctagttcacattgccggattcggatatcctgatgcatataataagaaacagaccatccactattacgaacagattacgctgaagagtatggcgggttcaggacataatgtttctcaggaagctttggctatcaaacgcatgctggagatgggcgcgatcaagaatcttacctcattttag

SEQ ID NO: 14884 - RNA, 645 nt, synthetic construct
  misc_feature 1..645: note = source = /note="Description of Artificial Sequence: Synthetic coding sequence"
  source 1..645: mol_type = other RNA
atgagacctaagaccggacaggtagggtgtgaaacccctgaggaattgggccctggtccacgccagcgttggcctctgctcttgctcggcctggcaatggtggcacacggattgctgcgccctatggttgcccctcagtctggagatcccgatcctggcgcatctgttggaagtagccgtagtagcctgagaagcctgtggggacgcctgctgctccagccatctccccagagggctgacccacgatgttggcctagaggattctggagcgaaccccagagtctgtgttacgtctttggcacaggcacgaaagtcacagttctaggacagcccaaagccaacccaacagttaccctattcccccccagctcagaagaactgcaggccaataaagcaaccctcgtgtgtctcatttccgacttctaccctggagctgtgaccgtcgcatggaaagcggatggtagccctgtgaaggccggcgtcgaaaccaccaaaccctccaaacagtccaataacaaatacgcggcatcctcctatcttagtcttacacccgagcagtggaaatcgcaccgctcctattcatgtcaagtgacgcatgagggctcaacagtggaaaaaaccgtagctcctacagaatgctcatag

SEQ ID NO: 14885 - RNA, 1050 nt, synthetic construct
  misc_feature 1..1050: note = source = /note="Description of Artificial Sequence: Synthetic coding sequence"
  source 1..1050: mol_type = other RNA
tgactgtacaaaaatcgcttgggatccggaggcaggggaagatgtatcaagcaaggggagaattggtactcgcccacagaattcgaggcaatggcaggacgcgcatcctctaaagattggaaacgctctatccgctacgcaggaagaccactacagtgcctgatccaggacggaatacttaacccacacgctgctagttgcacctgtgcagcctgctgtgacgatatgacattatccggccctgtgaggctgttcgtcccttacaagcgaaggaagaaggagaacgaactccccaccacaccagtcaagaaagactcaccaaaaaacatcaccctcctccctgctactgccgcgacgactttcaccgtaaccccaagtggccaaatcaccacaagcggagctctgacgttcgaccgcgcatctaccgtcgaggcaacagccgtaatcagtgagagtccagcccagggcgacgtcttcgccggagcaactgtccaggaagcatcagtgcagcctccgtgcagagcgtcacacccagaaccccactaccccggatatcaggacagctgccagatagcacctttcccagaagctgccctccccacaagtcaccccaaaatagtcctgacctcactcccagcccttgccgttccacccccaacacccaccaaagctgcacctcctgcactggttaacggcctagaactctctgagccccgctcctggctgtatctggaagaaatggtgaactctctgctgaacacagcccagcaactcaaaaccctgtttgagcaagctaagcacgcgagcacttaccgagaagccgccacaaatcaggctaagatacatgctgacgccgaacggaaagagcagagctgcgtgaattgtggaagagaagcaatgtctgaatgcacaggttgtcataaggtcaactattgttcaaccttttgtcaaagaaaaagatggtcactgactatgctgacttctctcgtgtctatttcatggctccgcgctatcctgccttgccaaccgccaaaagtgttaggtctctag

SEQ ID NO: 14886 - RNA, 600 nt, synthetic construct
  misc_feature 1..600: note = source = /note="Description of Artificial Sequence: Synthetic coding sequence"
  source 1..600: mol_type = other RNA
atgtcactcgacatccagagtctcgatattcagtgcgaagagctctctgatgcaagatgggccgagctcttacctctcctccagcagtgccaggtagtgcgactggacgactgtggacttaccgaggcaaggtgtaaagatatctctagcgctctgcgtgttaatccagctttagctgaactcaacctaagatcgaacgaactcggggatgtaggcgttcactgcgtgctacagggtcttcaaaccccttcctgcaaaattcagaaactgagcctccagaactgttgtctgacaggcgccgggtgcggcgtgctgtcctcgacgctgagaacactgcctacactgcaagagcttcatctctctgataatctgctgggcgacgcaggcctgcagttgctttgcgagggactacttgacccccagtgccgattggaaaaattacagctcgagtattgcagtctttctgccgcatcatgtgaacccttggcctccgtcctgagggcaaaacccgattttaaagaactcactgtaagcaataatgatattaacgaagctggagtgcgtgtcctgtgtcagggacttaaggatagcccctgttag

SEQ ID NO: 14887 - RNA, 465 nt, synthetic construct
  misc_feature 1..465: note = source = /note="Description of Artificial Sequence: Synthetic coding sequence"
  source 1..465: mol_type = other RNA
atggctgggatcccaggcctccttttcctgctattcttcctactctgcgcagtcgggcaggtgagtccctactcggcaccctggaagccgacctggccggcctatagacttccagtagttctcccgcaatccaccttgaatcttgctaagcctgatttcggcgccgaagcaaaattagaagtaagtagctcttgtggcccacaatgtcacaaaggcacacctctccccacatatgaggaagcgaagcaatacctcagttatgaaaccctatacgccaacggatcgcgcacagagacacaagtgggcatctatattctgagctctagtggcgacggagcccagcacagagacagtggcagctctggcaagagtcggcgaaaaaggcagatttatggttatgattctagattctctatctttggaaaggactttctacttaattatccattctcaacaagcgtgtag

SEQ ID NO: 14888 - RNA, 936 nt, synthetic construct
  misc_feature 1..936: note = source = /note="Description of Artificial Sequence: Synthetic coding sequence"
  source 1..936: mol_type = other RNA
atgggtataatccagtctatcctagctacaagccgcgactgttattcatttaagaaaaaacccattccaaaaaagcctactatgcttgcccttgcaaaaattcttctaatatctaccttattctatagcctgttgtccgggtcacatgggaaagagaaccaggatatcaacacgacccaaaatatagccgaggtgttcaaaacaatggaaaataaacccatcagtctagaaagtgaagccaacctgaactccgataaagagaatattacaacatctaacttaaaggcaagccacagcccacccctcaatctgcctaataactctcatggcatcactgatttctcatccaatagtagcgcagagcactcattaggtagcctgaaacctactagcacaatctccacctcccctcccctaatacacagctttgtgagtaaagtcccctggaacgcaccaatagccgatgaggaccttcttccaatttccgcacatccaaatgccacacccgcactgtcttcagagaatttcacctggagcctggttaacgacacagtgaagacgcccgacaattcctccatcaccgtaagcatactgtcttctgagcctacatcaccttccgtaacacccttgatagtcgagcccagcggctggctcacaaccaattccgactcatttaccggtttcaccccttaccaagagaaaacaacccttcagccaaccctcaaattcacaaataatagcaaactttttcctaacacttctgacccccagaaagtcctgaggctggacaatgcccctgagccctacgacgtgtcctttggaaatagttcctactataaccctacacttaatgactccgctatgcctgagagcgaagagaacgcaagagatgggatcccaatggacgacataccccctctcagaacaagcgtgtag

SEQ ID NO: 14889 - RNA, 1404 nt, synthetic construct
  misc_feature 1..1404: note = source = /note="Description of Artificial Sequence: Synthetic coding sequence"
  source 1..1404: mol_type = other RNA
atgttgattttttggaccattactctttttttgttaggtgccgctaagggcaaagaggtctgttacgaggatcttggctgttttagcgacacagagccatggggtggtacagccattagacccctgaaaatcctcccctggagtcctgaaaaaatcggcacaagatttctcctttacaccaatgagaacccgaataatttccaaatactgctgctgtcagatccctctaccatcgaagcatccaatttccagatggatcgtaaaacccgtttcataatacatggcttcatcgataaaggcgacgagtcatgggttacagatatgtgtaaaaagctgtttgaggtcgaggaggttaactgcatttgcgtggactggaagaagggctcgcaggctacatacacacaggccgccaacaacgtgagagttgtcggagctcaagttgcccagatgcttgacattctgttaaccgagtattcttacccaccaagtaaagttcatctaatagggcacagcctcggagcccatgtggccggagaagcaggatcaaagactcccggactgtctagaatcaccggccttgacccagtcgaagcaagcttcgagtcaacccctgaagaagtccgtctcgatccatccgatgccgattttgtagacgtgatccataccgatgctgctcccttgataccgttcttgggttttggaacaaaccaacagatggggcacctggacttcttcccaaatggcggtgaaagcatgcctggctgtaaaaaaaacgccttgagccagatagtggacctcgacggaatctgggccgggacccgcgacttcgtggcctgtaatcatttgcgttcctataaatactacctcgagtctatcctaaatcctgacggtttcgcggcttacccatgcacctcttacaagagttttgaatctgacaaatgctttccctgccccgatcagggctgcccccaaatgggtcattacgctgacaagtttgccggacggacaagtgaggagcagcagaaatttttcctaaacacgggagaagcgtccaatttcgcccgctggagatatggagtctcgattacacttagcggccgcacagcaaccggacaaattaaggtggctttgtttggcaataaaggcaatacacatcagtatagcatttttcgaggtatcctcaagcctggatctacgcactcgtatgagttcgatgccaagctggacgttgggaccatcgaaaaggtaaagttcttatggaataacaacgtgatcaatcctacacttccaaaggtgggcgccacaaaaataactgtacagaaaggagaagagaagacggtatacaacttttgtagcgaggacacagtacgcgaagacaccctgctgaccctgaccccatgctag

SEQ ID NO: 14890 - RNA, 81 nt, synthetic construct; identical to SEQ ID NO: 13251
  misc_feature 1..81: note = source = /note="Description of Artificial Sequence: Synthetic coding sequence"
  source 1..81: mol_type = other RNA

SEQ ID NO: 14891 - RNA, 549 nt, synthetic construct
  misc_feature 1..549: note = source = /note="Description of Artificial Sequence: Synthetic coding sequence"
  source 1..549: mol_type = other RNA
atgaggcgaatgtgggcaacacagggtttggcagtggcattggctctgagcgtgttaccaggatcccgcgccctcaggcccggtgattgcgaggtgtgtattagctatcttgggcgcttctatcaagacctcaaagacagagatgttaccttctctcctgccacaatcgaaaacgaacttatcaagttttgccgagaggcccgcggaaaagaaaaccgtttgtgctattatatcggcgccaccgacgacgcagctactaagattatcaacgaagtttctaagccattagctcaccatataccagtggagaaaatttgcgaaaagctcaaaaaaaaagatagccagatatgcgagttgaagtacgacaagcaaattgacctgagcaccgtggatctgaagaaactgagagtaaaggagttaaaaaaaattctggatgattggggtgagacatgtaaaggatgcgccgaaaaatccgattacatcaggaagattaacgagctaatgcctaaatatgcacctaaagccgccagcgcacgaactgacctatag

SEQ ID NO: 14892 - RNA, 153 nt, synthetic construct; identical to SEQ ID NO: 13253
  misc_feature 1..153: note = source = /note="Description of Artificial Sequence: Synthetic coding sequence"
  source 1..153: mol_type = other RNA

SEQ ID NO: 14893 - RNA, 666 nt, synthetic construct
  misc_feature 1..666: note = source = /note="Description of Artificial Sequence: Synthetic coding sequence"
  source 1..666: mol_type = other RNA
atgggggccaccacgatggatcagaagagcctgtgggcaggtgtggtcgttcttctccttctccaggggggctcggcctacaagctcgtgtgctacttcaccaattggagccaagaccgtcaggaaccaggcaaatttacacccgagaacatcgacccctttctttgttcccatttgatctatagtttcgcgtcaattgaaaataacaaagtgataatcaaagataaatccgaagttatgttgtatcagacaattaacagcttaaaaaccaaaaatccaaagttgaagatcttactttctattggagggtacctcttcggttctaaaggctttcatccgatggtcgattcttcaacgtcccgtttggagtttatcaatagcattatcctttttttaagaaatcacaacttcgacggcctggatgtgtcatggatctatccggaccaaaaggaaaatactcacttcaccgttctgattcacgagcttgccgaagccttccagaaagacttcaccaagtccacgaaagaaaggctgctcctcacagccggagtgtcggccggacgccaaatgattgataatagttaccaagttgagaaactggcaaaagatttggacttcattaatctactctcgtttgactttcatggatcctgggaaaagccctag

SEQ ID NO: 14894 - RNA, 1257 nt, synthetic construct
  misc_feature 1..1257: note = source = /note="Description of Artificial Sequence: Synthetic coding sequence"
  source 1..1257: mol_type = other RNA
atgagaacactgttcaatttactatggttagccttagcatgcagccccgttcacaccacattgagtaaatcagatgcgaaaaaagccgcctctaaaactctactcgagaaggtaaaattttgctcgtgctgccccgggtggtcagcaatggcacgctcttggcttacagcaacctctgccacccagagccaattctccgataaaccagtgcaggacaggggactggttgttaccgaccttaaggcggaaagcgtggtgctcgaacataggtcttattgttctgcaaaagcacgggaccggcacttcgctggtgatgttctgggatatgtcactccttggaactcccatggctatgatgtgactaaagtgttcggatctaagtttacgcagattagcccggtgtggctgcaactcaagaggcgcggcagggaaatgttcgaggtaacaggtctccacgatgtggatcagggatggatgagagcagtgagaaaacacgccaagggactgcacattgtccccagactgctctttgaagactggacgtacgacgactttagaaacgtattagactcagaggacgaaatcgaagaattgtctaagaccgttgtgcaggttgcgaagaatcagcactttgatggattcgtggtggaagtgtggaaccaactcctttctcaaaagcgcgttggactaatacacatgttaacacatctggctgaagctctgcaccaggctagattgctggctctgttggtgattcctcctgcaatcacaccgggtacagatcaattgggaatgtttacccataaggagttcgaacagctcgcccctgtattggatggtttttccttaatgacttacgattatagcacagctcaccagcccggccccaacgcacccctcagttgggttcgagcttgcgtgcaagtactggaccctaaaagcaagtggagaagtaaaatacttctcggactcaacttctacggtatggattatgcgacatctaaggatgctagagagccagtggtgggagctcgatacattcagacactaaaagaccataggccgcgaatggtctgggacagtcaggcaagtgagcattttttcgaatataagaagtcccgctccggtagacatgtcgttttctacccaacgttaaaaagtcttcaagttcgactcgaactggctagggaactgggggtgggggtgtctatttgggaattgggtcagggtctggactacttttatgatctgctgtag

SEQ ID NO: 14895 - RNA, 612 nt, synthetic construct
  misc_feature 1..612: note = source = /note="Description of Artificial Sequence: Synthetic coding sequence"
  source 1..612: mol_type = other RNA
atgcggtccctgcttttactatctgccttttgtttattagaagcagccttggctgcagaagtgaaaaagcccgcagccgctgccgcacctggcacggccgaaaagttaagcccgaaggctgcaaccctggcggaacgctcagccggtttggcattctccctctatcaggctatggcaaaggaccaggctgttgaaaatattctggtctcccccgtagtggtcgcctccagtctcggattggtgtctctgggcgggaaggcaacaacagcatcccaggccaaagccgtcctctctgcagagcagcttcgtgatgaggaagtgcacgctggactgggagaactgctgcgaagtctatccaattccaccgcaagaaacgtaacctggaaactgggaagccgcctgtacggacctagctctgtatcatttgccgacgactttgtacgaagtagcaagcagcattataactgtgaacattctaagatcaattttcgagataaaaggtccgccttacagtccattaacgagtgggcagcacagaccactgacggaaaactgcctgaggttactaaggatgtcgagcgtaccgatggggcactgctggtgaacgcctag

SEQ ID NO: 14896 - RNA, 492 nt, synthetic construct
  misc_feature 1..492: note = source = /note="Description of Artificial Sequence: Synthetic coding sequence"
  source 1..492: mol_type = other RNA
atgaggtcgttgcttctgctctctgctttctgcctcctggaagctgctttagccgctgaggtgaagaaaccggcagcagcagcagcacccggcacagccgaaaaactgtccccaaaggccgctacgctcgctgaaaggagcgctgggctcgccttctctctttaccaagccatggccaaggaccaagccgttgaaaatatcctggtatcccctgtcgttgtcgcctcaagcctcggactcgtatctctgggcggaaaggcaacaactgcctctcaggccaaagccgtcctgtctgcggagcagctgagagacgaagaggtgcatgccggattaggggaacttttaaggtctctgagtaattccaccgcccgcaacgtcacctggaaacttggtagccggctgtatggacctagcagcgtttcatttgcagatgatttcgtgcgatcaagcaagcagcattataattgtgagcactccaagattaacttctag

SEQ ID NO: 14897 - RNA, 570 nt, synthetic construct
  misc_feature 1..570: note = source = /note="Description of Artificial Sequence: Synthetic coding sequence"
  source 1..570: mol_type = other RNA
atgagcctggatattcaatcgctggatattcaatgtgaggaattaagtgacgcaagatgggccgagttactaccattacttcagcaatgtcaggttgtccgtctggacgattgtggcctgaccgaagctcgatgcaaggacatttcctcggcacttcgcgtgaaccctgccctagccgagctgaacctgagatcaaatgagctgggggatgtgggtgtgcactgtgtgctccagggcttacagaccccttcctgcaagattcaaaaactgtctctgcagaattgttgcctgaccggcgcaggatgcggggtattgtccagtactctcagaacactaccgacactacaggagctgcacttatcagacaaccttttgggtgacgcgggcctacagttgctatgcgaggggctacttgatccacaatgtcgattagagaaactgcagctggaatactgctccctgagtgctgcctcttgcgagccactagcctcagttttgagggctaagcccgatttcaaagaactaaccgtgtcaaacaatgacatcaacgaagcaggggttagggtttag

SEQ ID NO: 14898 - RNA, 585 nt, synthetic construct
  misc_feature 1..585: note = source = /note="Description of Artificial Sequence: Synthetic coding sequence"
  source 1..585: mol_type = other RNA
atgtccttagacatccagtccctagacatccagtgcgaagaactgagtgatgccaggtgggctgaattgttacctctgctgcagcagtgtcaggttgtacgattagacgactgcggcttgaccgaagcccgatgtaaggacatttcctctgcacttagggtcaaccccgccttagctgagttgaacctccggagcaacgaactgggtgacgttggtgtgcattgcgttctgcagggccttcagacaccatcctgcaagatccagaagctttctctgcaaaattgctgcctgacgggagccggatgtggcgtgttgtcaagtacactacgcaccctgccaacactccaggaactgcacctgtctgataacctgctcggagatgctgggcttcaattattgtgtgagggcctgttagacccccagtgtcggctggagaaacttcaattggagtattgttcattgagtgccgcctcttgcgaacccctggcctccgtgcttcgagccaaaccggatttcaaggaactgaccgtttcaaataatgacataaacgaagccggcgtaagggtgctctgtcaagggttgtag

SEQ ID NO: 14899 - RNA, 1086 nt, synthetic construct
  misc_feature 1..1086: note = source = /note="Description of Artificial Sequence: Synthetic coding sequence"
  source 1..1086: mol_type = other RNA
atgggtataatccagtctatcctagcaacgagccgcgactgttacagcttcaagaagaaacccattccaaagaagcccaccatgctagcactagccaaaatcttactgatctctactctcttctacagccttctttcaggcagtcacggaaaagaaaaccaggatatcaataccacacaaaacatcgcagaagtattcaaaacaatggagaacaaacctatttctctggaaagcgaggcaaatttaaactcagataaggaaaatatcaccaccagtaatcttaaggcttcccactcaccccccttaaacctacccaacaacagccatggcataacagatttcagctcgaatagttctgccgagcatagcctcgggtccctcaaacctacctccactatctccacatccccaccactaattcattccttcgtatcgaaagtcccctggaacgcacccattgccgatgaggacctactgcccatctctgcccaccccaatgccaccccagctctgtcatccgaaaatttcacatggagccttgtgaacgacacagttaagacccctgataactcctctattactgtaagtattctgtcctctgagccaaccagcccttcagtcacacctcttatcgtggaaccctccggctggctcacaacaaatagcgactcctttacaggtttcacgccttatcaagaaaaaaccaccctacagcctacacttaaattcacgaacaattccaagctgtttcccaatactagcgacccccagaaagagaacagaaataccggtatcgtcttcggggccattctcggtgccatcctcggagtgagcctgctcaccttagtggggtatctgttatgtggcaagcggaaaactgattccttttctcaccgcagactctatgacgacaggaatgaacccgtgcttagattggacaacgctcctgaaccttatgacgtatccttcggcaactcaagttactataatcccacgctaaacgattctgcaatgcctgagtcagaagagaatgcacgagacggaattcccatggacgacatccctcctctgcgcacaagtgtttag

SEQ ID NO: 14900 - RNA, 327 nt, synthetic construct
  misc_feature 1..327: note = source = /note="Description of Artificial Sequence: Synthetic coding sequence"
  source 1..327: mol_type = other RNA
taaccaaagtcgaaatggaggtctaagatattattgggcctgaacttttatggaatggactatgctacaagtaaagatgctagagagcctgtggtgggggcgagatatatacagactttaaaagaccatagaccaagaatggtgtgggatagccaagccagtgaacatttctttgaatacaaaaaatccaggtccggtagacatgtggtcttctatcctacgttaaagtccctgcaggttaggcttgaattagcccgcgagttgggagtaggggtcagcatctgggaacttggtcagggcctcgactatttctacgacctgctctag

SEQ ID NO: 14901 - RNA, 504 nt, synthetic construct
  misc_feature 1..504: note = source = /note="Description of Artificial Sequence: Synthetic coding sequence"
  source 1..504: mol_type = other RNA
atgagatcccttctcctactctccgccttctgtctgctggaagctgcacttgccgccgaagtcaaaaagcctgctgccgcagctgcgccagggaccgccgaaaaactgagtcccaaagccgcgaccctggcagaacggtcggccggccttgccttttctctctaccaagcaatggcaaaggatcaagctgtcgagaatattctggtgagcccagtcgtcgtcgcttcatccctgggcctggtgtctctgggaggtaaggctacaaccgcgtctcaggcaaaagcagtcctatcagctgagcagctgagagatgaggaagtccatgccggactgggggaactcttgagatcattgtctaactctaccgcccgaaatgtgacctggaaactgggcagcagactttatggacccagctcagtgtctttcgccgatgactttgtcaggtcttccaaacagcattataattgcgaacatagtaagatcaactttagagacaagcgatag

SEQ ID NO: 14902 - RNA, 1209 nt, synthetic construct
  misc_feature 1..1209: note = source = /note="Description of Artificial Sequence: Synthetic coding sequence"
  source 1..1209: mol_type = other RNA
atgatggttgcattaaggggtgcctccgcattgctggtactttttcttgccgcctttctccctccaccccagtgtacgcaggatcccgcaatggtccattacatatatcaacggtttagagtgttggaacagggtcttgaaaaatgcacccaggcaaccagagcatatattcaagaattccaggagttttccaagaacatttcagttatgcttggtaggtgtcaaacatataccagtgaatataagagcgctgtcggaaatctggcactgagggtcgaacgggcacagcgggaaattgattatattcaatacctacgggaagcagacgagtgcattgagtccgaagataagaccttggcagaaatgcttctccaagaagcagaagaggaaaagaaaatccgcacacttttaaatgctagctgcgataatatgctcatgggaataaagagcctcaaaatcgtcaagaagatgatggatactcatggttcatggatgaaagatgccgtttacaatagccctaaagtatacctgctgattggatcgagaaataacaccgtatgggagtttgccaatattcgcgcattcatggaggacaacacaaagcctgccccgaggaaacagattttaactcttagctggcaagggacaggccaggtaatctacaaagggttcttgtttttccacaaccaagccacatcaaatgagattattaagtataatttacaaaaacggaccgttgaggacagaatgctgctgccgggcggagtggggagagcactggtctatcagcattcaccctccacctacatagatctggcagttgatgagcacgggctttgggctattcattccggtcctggcactcatagccatctcgtcctgaccaaaattgagcctggcacattaggggttgaacactcctgggacacaccctgtcggtcacaagatgcggaagcttctttcctgctgtgtggcgtcctgtacgtggtctactctactggtggccagggccctcaccgaattacttgcatctacgatccactcggaaccattagcgaagaggacctcccaaaccttttctttcctaagaggccccgaagtcattctatgatccattacaacccacgagataagcaactctacgcatggaacgaagggaatcagattatttacaagctgcaaacgaagagaaaactgcctctgaaatag

SEQ ID NO: 14903 - RNA, 975 nt, synthetic construct
  misc_feature 1..975: note = source = /note="Description of Artificial Sequence: Synthetic coding sequence"
  source 1..975: mol_type = other RNA
atgagatctctgctactgctctctgccttttgcctgctcgaagccgccctggccgctgaagtgaaaaaacccgcggccgctgcagcaccgggcaccgccgagaagctttcacccaaggcagcaactctcgccgaacgcagcgctggccttgccttttctctgtaccaagccatggccaaagaccaggctgtcgagaacattctcgtgtctccagttgtcgtggcatcctcactgggtctcgtgagtctcggcggcaaagctactacagctagccaagccaaagccgtactctctgctgaacagctgcgagatgaagaggtccacgccgggctgggggaactccttagatccctctccaattctacggcccgtaatgttacatggaaattaggatcgcgtctgtatggaccgtctagcgtgtcctttgccgatgacttcgtacgctcatctaaacagcactataactgtgagcatagtaaaatcaattttagggataaaagatctgcattgcaaagcattaatgaatgggccgcccaaactaccgacggcaagctccccgaagtgaccaaagacgttgagaggactgacggagccttgctggtgaatgcaatgttttttaaacctcattgggacgagaaatttcaccacaaaatggttgacaaccggggattcatggtaacacgctcatacacagtgggggtcatgatgatgcatagaaccggattatacaactactacgatgacgagaaggagaagttgcaaatagttgaaatgccattagcacataaactatcatctctaatcattctgatgcctcaccacgtggagcccttagagcgtctcgagaaacttttgaccaaggagcagcttaagatttggatgggcaaaatgcagaaaaaggccgtggcgatctcgttgcccaaaggagtggtggaggttacccatgatctgcaagtgagaggcggaccagcgtag

SEQ ID NO: 14904 - RNA, 990 nt, synthetic construct
  misc_feature 1..990: note = source = /note="Description of Artificial Sequence: Synthetic coding sequence"
  source 1..990: mol_type = other RNA
atggtgtctaagtcacgttggaaactcctcgcgatgctggccttagtactcgtagtgatggtttggtattccattagcagagaagacagtttttattttccgatccctgaaaagaaggagccctgtctgcagggtgaggccgaatctaaagcaagtaaactgtttggaaactatagccgagatcaacccatctttctgcgcttagaagattacttctgggttaaaacaccatctgcatacgagctgccttacggaacaaaaggatcggaggatctgctcttacgggtattggcaattacctcctcttccatccctaagaacatccaatctctgcggtgccgcaggtgtgtggtggtggggaatggacacaggttacggaactcatctctgggagacgcaattaataaatacgacgtggtgataagactgaacaatgccccagtggcaggatacgagggcgatgtgggtagcaagacaacaatgcgactgttttacccagaatccgctcactttgaccctaaggtggaaaataaccccgatactctccttgttctcgttgctttcaaagctatggactttcattggatcgaaacaatactgagcgataagaagagggtgcgcaagggattttggaagcagccacctctcatttgggacgttaaccctaaacagatccgaatcctgaacccctttttcatggagattgcagctgataaacttttatccctgcccatgcagcagccccggaagataaaacaaaagcccaccactggtttactggcaatcactctggcccttcatctgtgcgatttggtacacatcgccggctttggatatcctgacgcttataataaaaagcaaactatacactactacgagcaaatcacactcaaaagcatggctggtagtggccacaatgtaagccaggaagccctcgcaattaaaagaatgctggaaatgggagccatcaagaatctaacatccttctag

SEQ ID NO: 14905 - RNA, 351 nt, synthetic construct
  misc_feature 1..351: note = source = /note="Description of Artificial Sequence: Synthetic coding sequence"
  source 1..351: mol_type = other RNA
atgcgcaccctgtttaatcttctatggcttgcgcttgcgtgtagccccgttcatacaaccctttcaaaatcggatgccaagaaagccgccagcaaaacactacttgaaaagtcccagttctccgacaagcctgtgcaggacaggggattggttgtgaccgacttgaaagcagagagcgttgtgctcgaacatcggtcctattgttcagcaaaagccagagaccggcactttgcaggcgacgtcctgggttatgtgacaccatggaattcccatggatacgacgtaaccaaagtgtttgggtcaaaatttactcagattagtccagtttggcttcaactcaaaagacggtag

SEQ ID NO: 14906 - RNA, 282 nt, synthetic construct; identical to SEQ ID NO: 13267
  misc_feature 1..282: note = source = /note="Description of Artificial Sequence: Synthetic coding sequence"
  source 1..282: mol_type = other RNA

SEQ ID NO: 14907 - RNA, 255 nt, synthetic construct; identical to SEQ ID NO: 13268
  misc_feature 1..255: note = source = /note="Description of Artificial Sequence: Synthetic coding sequence"
  source 1..255: mol_type = other RNA

SEQ ID NO: 14908 - RNA, 27 nt, synthetic construct
  misc_feature 1..27: note = source = /note="Description of Artificial Sequence: Synthetic coding sequence"
  source 1..27: mol_type = other RNA
atgagcctcgatattcaaagtctgtag

SEQ ID NO: 14909 - RNA, 576 nt, synthetic construct
  misc_feature 1..576: note = source = /note="Description of Artificial Sequence: Synthetic coding sequence"
  source 1..576: mol_type = other RNA
atgctcatcttttggacgataacgttattcttattaggcgcggcaaaaggaaaagaggtctgctatgaggacttaggatgtttcagcgataccgaaccctggggcgggacagcaattagacctttaaagatcctgccttggtctccagagaaaatcggcacacgatttctcctgtacacgaacgaaaaccccaacaacttccagatcctcctcctctccgacccaagcacaatcgaagctagtaactttcagatggaccgaaaaacccggtttataatccatggattcatcgacaagggtgatgagtcatgggttacagacatgtgtaaaaagttgttcgaagttgaggaggtaaactgtatttgtgttgactggaagaaagggtcgcaggctacgtacactcaagctgccaacaatgttcgagtggtgggcgcccaggtcgctcagatgctagatatactgctgacggagtattcatacccaccaagcaaagtgcatcttatcggtcacagtttgggagcacacgtcgctggggaggctggctcaaaaacacctggcctgtcacggatcacctag

SEQ ID NO: 14910 - RNA, 123 nt, synthetic construct; identical to SEQ ID NO: 13271
  misc_feature 1..123: note = source = /note="Description of Artificial Sequence: Synthetic coding sequence"
  source 1..123: mol_type = other RNA

SEQ ID NO: 14911 - RNA, 648 nt, synthetic construct
  misc_feature 1..648: note = source = /note="Description of Artificial Sequence: Synthetic coding sequence"
  source 1..648: mol_type = other RNA
atgaggcctaagaccggacaagtcggatgtgagactcctgaggagctgggaccggggcctagacaacggtggcctcttttgttgctcgggctggctatggtcgcccatggtctcctgcgtccaatggttgcaccgcaatcaggtgatcctgaccctggcgcatctgtggggagttcacggagttcactgcgaagtttatggggctccagactgctattacaaccttctccccagagagctgaccctcggtgctggcctagaggattctggagcgagccgcagagcttatgttatgttttcgggactggcaccaaggtgacagtgctagggcaacccaaagcaaaccctaccgtgacattgttccctccgagctctgaagaactccaggccaataaagcaacgcttgtgtgtctgatctcggacttttatcctggcgcggtgacggttgcatggaaagccgacggcagccctgtgaaagctggcgtagaaacaacaaagccctccaaacagtctaataacaagtatgccgcctcctcctacctctcgctgacaccagaacaatggaaatcccaccgatcctattcatgtcaggtcacccacgagggatctactgtcgaaaaaactgtcgccccaaccgaatgttcctag

SEQ ID NO: 14912 - RNA, 999 nt, synthetic construct
  misc_feature 1..999: note = source = /note="Description of Artificial Sequence: Synthetic coding sequence"
  source 1..999: mol_type = other RNA
atgtgtccagctggatggaagctcttggccatgttagcattagtgttagtggtgatggtttggtacagcatcagtcgcgaggatagatacatagaactgttttactttcccatcccagaaaagaaggagccgtgtctgcaaggcgaggcagaatctaaagctagtaagttgtttggcaattatagtcgggatcagcctattttcctccgattggaagactatttctgggtgaaaactccgtccgcttatgagctaccttacggcacaaagggctcagaagatctgctgttgcgagtattggctatcaccagttcatctattccaaaaaacatccagagcttgaggtgccgcagatgtgtggtcgtgggcaacggtcaccgattaaggaattcctccctgggagacgctatcaacaaatatgacgtcgtgatccggcttaacaatgccccagtagctggttatgagggggatgtcggctccaaaacaactatgcgacttttctaccccgaatccgctcatttcgatcccaaagtggaaaataaccccgataccctactcgtactggtcgctttcaaggccatggactttcactggatcgagaccatactgagcgacaagaaacgtgtgagaaagggtttttggaagcagccccccctcatctgggacgtcaaccccaagcagattcgaattctgaatcccttttttatggagattgccgctgacaaactgctctccctccccatgcaacagcctcgcaagataaaacaaaaacctacaaccggcttactggcaatcacccttgcactgcacctctgcgacctcgtccacatcgctggcttcggatacccagatgcctacaacaaaaagcagacaatacactactacgaacagattactctgaaatccatggcaggatcaggtcataatgtaagccaggaggccttagcaattaaacgaatgctggagatgggcgcaataaagaatcttacaagtttctag

SEQ ID NO: 14913 - RNA, 888 nt, synthetic construct
  misc_feature 1..888: note = source = /note="Description of Artificial Sequence: Synthetic coding sequence"
  source 1..888: mol_type = other RNA
atgcgctctctgcttctattgtcagccttctgcctccttgaagccgccttggctgccgaagtcaaaaagcctgctgcagcggccgcccccgggactgccgagaaactatctccaaaggccgctactctggccgaacggtcagctgggctggcattttcactctatcaagcaatggctaaagaccaggccgtagagaacattctggtgtcccctgtggtggtggcatcgtcactgggcctagttagtctgggtggcaaagctacgacagcatcccaggctaaagccgtgttatcggccgaacagcttcgcgacgaggaagtgcacgccggactgggagagctccttcgctccttatccaactctaccgctagaaatgtaacatggaagctgggctctcggctgtacggtccatccagtgtgtctttcgccgacgactttgtgagatcctccaaacagcactacaattgcgaacactccaaaatcaatttccgcgataagagatctgcccttcaatcaattaacgagtgggccgcccagaccaccgacggaaaactgcctgaagtgacgaaggatgttgagaggaccgatggcgcccttctcgttaatgcaatgttctttaagcctcattgggacgaaaagtttcatcacaaaatggtcgataatcgggggtttatggtcacgcgatcttacaccgtcggtgtgatgatgatgcaccgcaccgggctgtacaactattacgacgacgaaaaagaaaagctgcaaattgtggagatgccattggcacacaagctgtcctcccttatcattctaatgccacatcatgtagagccgcttgagagactggagaaattgctaactaaggaacagttgaaaatatggatggggtag

SEQ ID NO: 14914 - RNA, 399 nt, synthetic construct
  misc_feature 1..399: note = source = /note="Description of Artificial Sequence: Synthetic coding sequence"
  source 1..399: mol_type = other RNA
atgagaaccctcttcaacctcctgtggctcgccctagcctgcagtcccgtccacaccaccctatctaaatcagacgccaaaaaggccgcgagtaaaactctgctggaaaaatctcagttcagtgataagccagtgcaggacaggggcctggtggtcacggacttaaaggctgaatccgttgtcctggaacatcgatcatattgctccgctaaggctagagatcgccattttgccggcgacgtgctgggctatgtaaccccctggaactcccacggatacgatgtaactaaagtctttggcagcaagtttactcaaatttcaccagtatggctgcaactcaaacgacgggggcgcgagatgttcgaggtcactgggctgcacgatgttgatcagggctag

SEQ ID NO: 14915 - RNA, 360 nt, synthetic construct
  misc_feature 1..360: note = source = /note="Description of Artificial Sequence: Synthetic coding sequence"
  source 1..360: mol_type = other RNA
atgcgcacactgttcaatttgttgtggctggctttggcgtgctcccctgtgcacacaactctttcaaagtctgatgccaagaaggcagctagcaagacactactggaaaaaagccaattttctgataagcccgtgcaagatagaggcctggttgtgacggacctaaaggctgaatccgtcgtgcttgagcatcgatcatactgtagtgctaaagcacgagatagacacttcgccggtgacgtgctgggctatgtgaccccatggaattctcacggctacgatgtgacaaaagtttttggtagcaaatttacacaaataagtccagtttggctacagctgaaacgccgtggaagagagtag

SEQ ID NO: 14916 - RNA, 390 nt, synthetic construct
  misc_feature 1..390: note = source = /note="Description of Artificial Sequence: Synthetic coding sequence"
  source 1..390: mol_type = other RNA
atgcctatggcttctccccagaccctagttctttacctgctcgtactggccgtcacagaagcctgggggcaagaagctgtaatccctgggtgtcatctgcatccgtttaacgtaacagtgagatcggatcgacaagggacctgtcagggctctcacgtggctcaagcctgtgtcggtcattgtgagtcctctgctttcccttcgcggtacagtgtcctcgtggcctcagggtatagacacaacatcacctcagttagccagtgttgcaccataagtggcttaaagaaagttaaggtacagctgcagtgtgtcgggagtcggagagaagagttagagatattcacagccagagcatgccagtgtgatatgtgtagactgagtaggtattag

SEQ ID NO: 14917 - RNA, 1386 nt, synthetic construct
  misc_feature 1..1386: note = source = /note="Description of Artificial Sequence: Synthetic coding sequence"
  source 1..1386: mol_type = other RNA
atgagcctcgacattcagagcctcgacattcagtgcgaagagctctccgacgcccgatgggctgagcttcttcccctcctgcagcagtgtcaagtggtcagattagatgactgtggacttacagaggccagatgcaaagatatcagttccgctttgcgcgtcaaccctgccctggccgaactaaatctgagatcaaacgaacttggagacgtgggcgtgcattgcgttcttcaaggattgcagacaccgtcatgcaagattcagaagctctccctgcagaattgctgtcttactggagccggttgcggtgttctgtcttctacacttcgaacattaccaacattgcaagagctgcacctgagcgacaacttattaggcgatgcaggactgcagctgctttgtgagggcctcctggatccccagtgcagactagaaaaacttcagttggaatactgttctttaagcgctgcctcatgtgaacccctggcatctgtcttgcgggccaagcctgacttcaaggaactgaccgtgagcaacaatgatattaacgaggcaggggtgagagtgttatgccagggccttaaagatagcccttgtcagttagaggctctgaaacttgaatcttgtggggttaccagcgataactgcagggatctgtgtggaatcgtagccagcaaagcttctttgcgcgagcttgctttgggatccaataagctcggagatgtgggtatggctgagttgtgccctgggctactgcacccctccagtagactgcgcacactgtggatctgggagtgcggcattaccgcaaaaggctgtggcgatttgtgtcgagtactgagagctaaagagtccttgaaggaactgagcctagccggaaatgagctgggtgatgaaggcgcaagactactgtgcgagaccttgttagaaccaggatgccaactggagtctctgtgggttaaatcgtgctctttcacagccgcatgctgttctcatttttcttcagtcctagcccaaaataggtttttattggagctccagattagcaacaaccgcctcgaggatgctggcgtcagggaactgtgtcagggtttgggccaacccggaagcgtgctacgggtgctctggcttgcagactgtgacgttagtgattctagttgctctagccttgctgcaacactgctcgcaaaccactcactgagagagctcgacttgagtaataattgtctgggcgatgcaggaatcctgcagctcgtggaatctgttagacagcctggttgcttgttggaacagctcgtcctgtacgacatctattggtcagaagaaatggaagacaggttacaagcgctggagaaagacaagccgtcattaagggttatttcatag

SEQ ID NO: 14918 - RNA, 453 nt, synthetic construct
  misc_feature 1..453: note = source = /note="Description of Artificial Sequence: Synthetic coding sequence"
  source 1..453: mol_type = other RNA
atgaggagtctgctcctattgtccgctttttgcctgctcgaggcggccctggcagctgaagtcaaaaagcccgccgcagccgccgcccctggcacagccgagaagctgtcccctaaggctgccactctggcagagcgtagcgccggtctggcattcagtttatatcaagcaatggccaaagaccaggccgtcgaaaacatcctcgtaagtcccgttgtggtggcctcttccttaggactggtctccctcggtggtaaagcaacaaccgcttcacaggctaaagcagtccttagcgccgagcaattacgagatgaagaggtacatgccggtcttggagagttactgagaagtttatctaattcaaccgctagaaacgtcacctggaagctggggtcccgtctttacggtccgtcaagcgtatcatttgccgacgacttcgtgaggtcgagctag

SEQ ID NO: 14919 - RNA, 1257 nt, synthetic construct
  misc_feature 1..1257: note = source = /note="Description of Artificial Sequence: Synthetic coding sequence"
  source 1..1257: mol_type = other RNA
atgagatcactcttgctgcttagtgcattttgtttgctggaggctgctttggccgccgaagttaaaaaaccagccgcagccgctgctcctggcacagcagaaaagctttctcctaaagcggcaaccctggccgagagatcagccggtctcgccttctccctgtaccaagccatggcaaaggatcaggctgtggaaaacattcttgtatctccagtcgttgttgcatcctccctgggactggtttctcttggcgggaaggcaactacagcctctcaagctaaagctgtgctcagtgccgaacagctgagagacgaagaggtgcatgcggggctcggtgaactcttacggtcgctttcaaactccacagctcggaatgtcacttggaaactgggctctcggttgtatggtccatcttccgtatccttcgctgatgatttcgtgaggtcatcaaagcagcactataattgcgaacattccaagatcaacttccgcgataagagatccgcactgcaatcaattaatgagtgggccgcccagaccaccgatggcaagctgcccgaagtaaccaaagacgtggaacgaaccgatggagccctcttagtgaatgctatgttttttaagccacactgggacgagaaatttcaccataagatggtggataacaggggatttatggtgacccgctcctatactgtgggcgtaatgatgatgcaccggaccggactatacaattactatgacgatgaaaaggaaaagttacagatcgttgagatgccgctcgcacataaattaagctcccttattatcttgatgccccatcacgtggagccccttgaaagattggaaaaacttctgacaaaagaacagctgaagatatggatgggtaaaatgcaaaagaaagctgtggctatcagtctccccaaaggggtggttgaagtgactcatgatttacagaagcacctggctggattgggactgacagaagctatagataaaaacaaggcggatcttagccgaatgtcaggcaagaaggatctctatttagcatcagtgttccacgcgaccgcatttgagctcgacacagacgggaacccatttgaccaggatatatacggccgagaagaattaagatcacccaagctgttttatgccgaccacccatttatatttctcgttcgcgacacccagagtggctctctgctgttcataggtagattggttagacccaagggagataagatgcgggacgagttatag

SEQ ID NO: 14920 - RNA, 1002 nt, synthetic construct
  misc_feature 1..1002: note = source = /note="Description of Artificial Sequence: Synthetic coding sequence"
  source 1..1002: mol_type = other RNA
atggtttcaaaaagccgatggaagcttctcgccatgttagctctggtcttggtggtgatggtctggtattcaatctcgagagaagatcggtacatagagctgttttatttcccaatccccgagaagaaggaaccatgcttgcagggagaagctgagtcaaaggcctcaaagctgtttggcaactactcaagagatcagccaatctttttacgactggaagactacttttgggttaaaacacccagtgcatacgaattgccgtacggaacgaaaggttcagaggatttgctgttgcgtgtgttagccattacttctagtagtattcccaagaacattcaatcattgaggtgcagaagatgtgttgtggtgggaaatgggcaccgactaagaaattcatcactgggtgacgcaattaataagtacgacgtcgtgatccggctcaataatgccccagtggccggctatgagggagatgttggtagcaagaccaccatgcgactgttttaccctgagtccgcgcacttcgatccgaaagtggaaaacaatcccgacaccctcctcgtactggtggcctttaaagctatggacttccactggattgagactattctcagcgataaaaaaagagttcgcaagggattttggaaacagccacctctgatctgggacgtcaaccctaagcagatacgaattctgaacccctttttcatggaaattgccgctgacaagctgctatccctgccaatgcaacaacctagaaagataaaacagaagccaacaaccggtcttttagctattactctggcactccacttatgtgacctggtacacattgctggttttggctaccccgacgcttacaataagaaacagacaatccattactacgaacagatcactttgaaatctatggctgggtcaggacacaatgtgagtcaggaagcacttgcgattaaaagaatgcttgagatgggagccattaagaacctcacaagtttttag

SEQ ID NO: 14921 - RNA, 987 nt, synthetic construct
  misc_feature 1..987: note = source = /note="Description of Artificial Sequence: Synthetic coding sequence"
  source 1..987: mol_type = other RNA
atgtgccccgccggctggaagttattggccatgcttgcactcgtccttgtcgtgatggtgtggtattccatttccagagaggactctttctatttccccatcccagaaaaaaaagagccctgcctccagggcgaagccgaaagtaaagcatccaaactttttggaaattattctagagaccaacctatcttcctccgcctcgaggattatttttgggtgaagactccatctgcctatgaacttccctatggcaccaaaggaagcgaggatctgctcttaagggttttagcaattacctcctcctccattcctaagaacatccaatccctacgatgccgacgatgtgtggtagtgggcaacggacaccgactaagaaatagctcgctgggggatgccataaacaaatacgatgtggtgatacggctgaacaatgcacctgttgctggctacgaaggcgatgtaggctccaaaaccactatgcgcctgttctatcctgaatccgcccatttcgatccgaaagtagaaaacaacccagataccctgttggtactagtggccttcaaagccatggactttcactggattgagactattttatctgataaaaagcgggtgaggaagggattttggaaacagcctccactgatttgggacgtcaatcccaagcagatccggattttaaacccattttttatggaaatcgccgcagacaagctactatcactgccaatgcagcaaccacgcaaaattaaacagaaaccaactacgggacttttagccatcactctggcactccacctctgcgacctcgtacacattgctgggtttggctatcctgatgcctataataaaaaacagaccatacattactacgaacagataactctcaaaagcatggcaggttctggtcacaacgtatcacaggaggccctggcaattaaacgaatgctcgaaatgggagctattaagaatcttacctcattctag

SEQ ID NO: 14922 - RNA, 585 nt, synthetic construct
  misc_feature 1..585: note = source = /note="Description of Artificial Sequence: Synthetic coding sequence"
  source 1..585: mol_type = other RNA
atgacaatgagacataattggacaccggatcttagcccattatgggtgctgctgttgtgcgcacacgtcgttacactactagttagagccacaccagtctcccagaccacgaccgccgctaccgcgtcagtccggagcaccaaggacccatgtccatcacagcctcctgttttcccagctgcaaagcaatgtcccgcattagaagtcacctggcctgaagtcgaggtccccctgaatggaaccttgagcttgtcctgtgtcgcctgttctcgctttccgaacttttccatactttactggttaggcaacggaagcttcatcgagcacctccctggacggttatgggaaggctccacgagccgagaaagaggcagtactggcacccagttgtgtaaggcgctggttctagaacagttgacacccgctcttcactctaccaatttctcttgcgtccttgtcgaccctgagcaggttgtacagcgacatgttgtcctcgcccagctctgggccgggctcagggccaccttaccccccacccaggaggcactgccaagctcacattcaagcccacagcagcaaggatag

SEQ ID NO: 14923 - RNA, 1386 nt, synthetic construct
  misc_feature 1..1386: note = source = /note="Description of Artificial Sequence: Synthetic coding sequence"
  source 1..1386: mol_type = other RNA
atgtcactggatatccagtccctcgacattcagtgtgaggagctgtcagatgcacgttgggccgaactgctccctctcttgcaacaatgccaggtagtccggctggatgattgcggactaactgaagctcgatgtaaagacatatctagtgctctccgggtaaaccccgccttggccgaacttaacctgaggtcaaacgaactgggagatgtgggtgttcattgcgttcttcaaggactccagaccccttcatgtaaaatccagaaattatcactgcaaaactgttgcctgaccggagcaggatgcggggtcctgtcttctactcttagaaccttacccacactacaggaattacacttatctgacaatctgttaggagatgccggcctccaactcctttgcgagggcctgctcgacccccagtgtcggcttgaaaaactccagctcgaatactgcagtttgtccgcagcatcttgtgagcctcttgcaagcgtattgcgcgctaaacccgactttaaagaactgacggtatctaataatgatatcaatgaggcaggcgtgagagtgctttgccagggactaaaggactcaccctgccagttggaggctctgaagctggaatcctgtggcgtgaccagtgacaattgtagagacttgtgtggcatcgtggctagtaaagcttcccttagagagctggctctgggatcaaataagctcggagacgtgggaatggctgaattgtgtccgggactcctccatccatcttcgcgactcaggaccctgtggatttgggaatgtggtatcaccgcaaaggggtgtggggatctctgccgagtgctgcgagccaaggagagcctcaaagaactgagcctcgccggaaatgagctgggcgatgagggagccagacttttgtgcgagactctccttgaacctggatgccaactggaaagtctttgggttaaatcgtgctcctttaccgccgcttgttgttctcacttctcatccgttctagcccagaacagattcttgctggaacttcaaatctcaaataaccgcttagaagacgccggcgtgcgggagctatgccagggcctgggccaaccggggtcggtgctcagagttctgtggctggccgattgtgacgtctcggactcttcatgttcaagcctggctgctaccctactggccaaccattccctcagagaacttgacctgtcaaataactgtctgggcgacgctggaatactgcagcttgtggagtccgtccggcaacccgggtgcctgctggaacaattagtcttatatgatatatattggagtgaagagatggaggatcgactccaggctctggagaaagataaaccttccctacgcgtgatatcttag

SEQ ID NO: 14924 - RNA, 1995 nt, synthetic construct
  misc_feature 1..1995: note = source = /note="Description of Artificial Sequence: Synthetic coding sequence"
  source 1..1995: mol_type = other RNA
atgccgcaagctccatcaactggctctagcctgatccgagatccctccatcgcccatagaaatacccaaatcctatggaccgaggccggtagagacctcgcccaggatactagatacacaggggaagaatctttgaccattttcgttgacaagcgcaagctgtccaagagggccgaggggtccgactcaacaacaaacagttcctcagttacgttggagactttacaccaattagcagcatcatactttatagacagggattcaacactacgacgattgcatcacatacaaatagcatccactgccataaaggtgactgagacccgcactggcccccttggctgttctaattatgataatctcgactccgtttctagcgttttggttcagtctcccgagaacaagattcagctgcagggcttacaggttttactgccagactacttacaggagcgattcgtacaggctgctctttcttatatcgcgtgtaattctgaaggagaatttatatgtaaagaaaacgattgttggtgccattgcggtcctaagttcccggagtgcaattgcccatcaatggacattcaggctatggaggagaatctcctacgcatcaccgaaacgtggaaagcttacaacagcgactttgaagaatccgacgaattcaaactgtttatgaaaagattgccaatgaattattttttaaacactagtaccatcatgcatctgtggactatggattcaaacttccagcgccgatacgaacagctcgaaaactccatgaaacagttattcctgaaggcacagaaaattgtgcacaagctcttctccctatctaaacgatgtcacaagcagcctctgatttctttacccaggcagaggaccagcacctattggttaacccggatccagtcctttctatactgcaatgaaaatgggcttttaggctccttctctgaggaaacgcactcttgtacctgccccaatgatcaagtcgtatgcacggctttcctcccctgtaccgttggagatgcttcagcctgcctcacctgcgcccccgacaatagaactagatgtggcacctgcaacaccggttacatgctgagtcagggactctgcaagcctgaagtagctgaatccactgatcactatatagggtttgaaactgatcttcaggatctggaaatgaaatatctgctgcagaagaccgaccggaggattgaagtacacgctattttcatctcgaatgatatgaggctgaattcttggttcgacccctcttggagaaagcgtatgctcctgaccttgaaatccaataaatacaaatcttctctcgtccatatgattctgggcctttccttacagatttgtctaaccaaaaatagcactctcgagcccgtcttagccgtctacgtgaatccttttggcggcagccacagcgagtcttggtttatgcccgtgaatgagaatagtttccccgactgggaaagaacgaaacttgacctgcctctgcagtgctataactggaccctgacactggggaataaatggaagacattcttcgagaccgtgcacatctacctgagatctcgcattaaatccaacggacctaacggcaatgagtctatatactatgaaccgctcgagtttattgacccgtcacgaaatcttggctatatgaagatcaataacatccaagttttcggttatagcatgcatttcgaccctgaggcaatccgcgacttgatactgcagctagactacccatatacacaaggctctcaggactctgctcttctccagttgctggagattagagatcgggttaataaactctcgccaccaggtcagcgccgactggatctgttttcttgtctgctccgtcaccgcctgaaattatccacctctgaagttgtcaggattcaatccgctcttcaggccttcaacgcaaagctccccaataccatggactatgataccactaagctatgctcgtag

SEQ ID NO: 14925 - RNA, 459 nt, synthetic construct; identical to SEQ ID NO: 13286
  misc_feature 1..459: note = source = /note="Description of Artificial Sequence: Synthetic coding sequence"
  source 1..459: mol_type = other RNA

SEQ ID NO: 14926 - RNA, 696 nt, synthetic construct
  misc_feature 1..696: note = source = /note="Description of Artificial Sequence: Synthetic coding sequence"
  source 1..696: mol_type = other RNA
atgttatatataggcatcgccgaatacttttttaaatcagcctcatttgcccactttaccgctggcgtgttcaatgtgaccctctccacggaagaaatttctaatcatttcgtccagaattctcaaggattgggcaatgtgcttagcaggatagctgaaatatatatcctctcccagccgtttatggtcaggattatggctaccgagccacctattatcaacctgcagcctggaaactttacccttgacattcctgctagcattatgatgctaacccaaccaaaaaattcaaccgtcgaaacaattgtgagtatggactttgtggccagcacctctgtcggtttagttatcctcggacaacgactagtctgctcattgtccctgaataggtttcgcttagcccttcccgagtccaataggtccaatatcgaggtccttcgtttcgaaaacattctctcaagtatcttgcattttggagtgcttcctctcgccaatgccaagttgcagcaaggctttccactcagtaacccacataagttccttttcgtgaacagcgacatcgaagtcctggaggggtttctcctaatttcaacggacctaaaatatgagactagttcaaagcaacaaccaagcttccacgtgtgggaaggacttaatctgattagccgtcagtggaggggcaagagtgcaccatag

SEQ ID NO: 14927 - RNA, 1911 nt, synthetic construct
  misc_feature 1..1911: note = source = /note="Description of Artificial Sequence: Synthetic coding sequence"
  source 1..1911: mol_type = other RNA
atgacaacttggagtctgcggcggcggccggcccggacactaggcctccttctgttggtagtcctggggttcttagtactcagacgcttagattggtcaacacttgtgcctctacgcttaagacacaggcagcttggattacaggctaaaggatggaattttatgctggaagattcaacattttggatattcggtggaagcatccactatttcagggtgccccgagagtattggcgggaccgattgctgaagatgaaagcatgcggactgaataccctgacaacctacgttccgtggaacctgcacgaacctgagcgtggcaagtttgacttctcaggtaaccttgacctggaggcatttgtactgatggcagccgaaattgggctctgggttatcctgagacccgggccttacatttgtagcgaaatggacttgggcggacttccttcatggcttctccaggatcccgggatgcgcctgcgcactacatacaaaggctttactgaagcagtcgacctttactttgaccatctgatgtcaagagtcgtacccctgcagtataaacggggagggcctataatagcagtgcaagtggaaaatgaatacggatcatataacaaggatcctgcatatatgccatacgtgaaaaaggcactagaggatcgtggtatcgtcgaactgctcttaactagcgacaataaggacggactaagtaagggcattgtgcagggagttttggccactataaatttgcagagtacccatgaactccaactcttaactaccttcctgttcaatgtccaggggacgcagcccaaaatggttatggaatattggaccgggtggtttgactcctggggcggcccacacaatattctggatagctcagaggttttaaagacagtgagtgccatcgtcgatgccggttcatcaattaatttatacatgtttcacggaggaactaactttgggtttatgaacggcgcaatgcatttccatgactataaatctgatgtcacaagttacgattacgatgctgttcttacagaagccggagattacaccgcgaagtatatgaaactgcgggatttttttgggagcatctcaggcatacctctgcccccaccacctgacctcctgccgaaaatgccgtacgagccactgacacctgttctgtacctctctctgtgggatgccctgaagtatctcggagaacccatcaagtcagagaaacctataaacatggaaaacctgccagtgaacggaggcaacggtcagtcattcggctacatactgtatgagacatctattacctccagcggaatactgtccggccatgtgcacgaccgaggccaggtttttgtcaacaccgtgagcattggatttttagattataaaacaacaaaaattgccgtgcccctcatccagggttataccgtcttgcgcatcctggtggaaaatcgaggaagggtcaactatggcgagaatatcgacgaccagcgaaagggactcattggcaacctctatttgaatgattcccctctgaaaaacttccggatctacagcctcgacatgaagaagtcctttttccagagattcggcctggataagtggagcagtctgccagaaacacctactctccctgcattctttctcggctccctgagtatcagctctaccccttgtgacacttttctgaagttggagggttgggaaaaaggcgttgtgttcatcaatggtcagaacctgggacgttactggaatatcgggccacagaaaacactgtatctgccaggaccctggctttcttccggtatcaatcaggtaattgtctttgaagaaaccatggccggacccgcactgcaattcacagaaaccccacacctaggtagaaatcagtatatcaagtag

SEQ ID NO: 14928 - RNA, 1374 nt, synthetic construct
  misc_feature 1..1374: note = source = /note="Description of Artificial Sequence: Synthetic coding sequence"
  source 1..1374: mol_type = other RNA
atggggtgttctttgcctttatcctgtattatggttcgcagcgtggcttgggctggcttcatggttcttctgatgataccttgggggtccgccgccaaactggtctgttactttactaattgggctcagtatcggcaaggggaggcccgtttcttgcctaaggacctggatccatcgctttgtacccatctaatatatgcattcgccggaatgaccaaccatcaactatcgacgacagagtggaacgatgagacactgtatcaggagtttaacggactgaaaaaaatgtttacagacatggtggccacagctaataaccggcagacctttgtcaattctgccattagatttctgcgaaaatattcattcgatggtcttgatctggattgggagtacccaggatcccaaggctctcccgccgtcgataaggagcggttcactacacttgtgcaggatctggccaacgcgttccagcaggaggcacagacttcaggtaaggaaaggttattactctccgctgctgtaccagccggtcaaacctacgtcgacgcaggctacgaggtcgacaagatagcccagaaccttgattttgtgaacctgatggcctacgattttcatgggtcttgggaaaaagttaccggtcataattccccactttacaaacgccaagaagagtctggggccgccgccagcctcaacgtggatgctgcggtccagcagtggctacagaaaggaacacccgcttctaaacttatcctgggaatgcccacatacggaagaagcttcactctcgcgtcctcatccgatactagagtgggcgcgcccgctaccggctccggtaccccgggacccttcactaaggaaggcggaatgttggcttattacgaagtttgttcttggaaaggcgccactaaacagaggattcaggaccagaaagtgccttatatattccgcgataaccaatgggttggatttgatgacgttgagtcctttaagacaaaagtctcgtatctcaaacagaagggattagggggggcaatggtttgggccttggaccttgatgactttgccggtttcagctgtaaccaaggtagatatcctctaatccaaactcttcgccaggagcttagccttccatacctgccttccggtacacccgagctcgaggtgccaaaacccggacaaccatccgagcctgagcacggcccaagtcccggacaagacaccttctgtcaaggtaaagcagatggcttatatccgaacccccgcgaacggtccagtttctattcctgcgcagccggtaggctgttccagcaatcttgcccaacaggcctggtattttccaacagctgtaaatgttgcacctggaattag

SEQ ID NO: 14929 - RNA, 1125 nt, synthetic construct
  misc_feature 1..1125: note = source = /note="Description of Artificial Sequence: Synthetic coding sequence"
  source 1..1125: mol_type = other RNA
atgtacgtaagcactcgagagagatataaatggttgagattttcggaagattgcctctacttaaacgtgtatgcccccgctcgagccccaggcgatccacaacttcctgtaatggtgtggttcccaggcggagcattcattgttggcgcggcctctagttatgagggctctgatctggctgctagagaaaaggtagtgctggtgttccttcagcatagacttggcatctttggttttcttcgatggaggggtaggacggacgacagccacgcccggggaaattggggactattggaccagatggccgcacttcggtgggttcaagaaaatatcgcagcatttggtggtgatcccgggaatgtcacgttgttcgggcagagcgctggtgcaatgtctatctctggactgatgatgtcccctctcgcaagcgggctcttccacagagcgatcagtcaaagtggcacggctctttttagactgtttatcacttccaaccctctcaaagtagcgaaaaaagtggcacaccttgctggatgcaaccacaactcaacacaaattcttgtgaattgcttacgggctctgtctggtacaaaggtgatgcgagtttcaaacaaaatgcggttcttgcaactcaactttcagagagatcctgaggaaatcatttggtcgatgtccccagtggtggacggggtggtgattcccgacgacccattggtactcctaactcagggcaaagtgtctagtgtgccttacttgctgggcgtgaataatctcgaatttaactggctgctcccctatattatgaaattcccgctgaaccgccaggccatgagaaaagagaccattacaaagatgctgtggagcacccgtactctcttgaacatcaccaaagaacaggtgcctctggtagtcgaagagtacctggacaacgtaaatgaacacgattggaaaatgctgaggaatagaatgatggacatagttcaagacgctaccttcgtatacgctaccctccaaaccgcacactaccatcgcgagacgcctatgatgggaatctgcccagcaggccacgccacaacaagaatgaagtcaacctgttcttggatcctcccacaagaatgggcgtag

SEQ ID NO: 14930 - RNA, 384 nt, synthetic construct
  misc_feature 1..384: note = source = /note="Description of Artificial Sequence: Synthetic coding sequence"
  source 1..384: mol_type = other RNA
atgaagaccggactgttttttttatgccttcttggcactgccgcagccatacctacaaacgcccgcctgttgtctgaccatagtaagcccaccgccgagaccgtagccccagataacactgctattccaagcctgcgcgcagaggctgaggagaacgagaaggagaccgcagtttcaaccgaagatgattcccaccacaaagccgaaaaaagctccgttctgaagagcaaagaagaatcgcatgaacaaagtgccgagcaggggaagagctcaagccaggagttaggattgaaggatcaagaagacagcgacggccacctcagcgtgaatcttgaatacgccccaacagaaggcaccctggacattaaggaggatatgagttag

SEQ ID NO: 14931 - RNA, 285 nt, synthetic construct; identical to SEQ ID NO: 13292
  misc_feature 1..285: note = source = /note="Description of Artificial Sequence: Synthetic coding sequence"
  source 1..285: mol_type = other RNA

SEQ ID NO: 14932 - RNA, 414 nt, synthetic construct
  misc_feature 1..414: note = source = /note="Description of Artificial Sequence: Synthetic coding sequence"
  source 1..414: mol_type = other RNA
atggctgcgctctcaagagctctcggaccccttcggacgcctgctcctcccctgtggatcggcctctttctggtcgcaaccggatcccagcagtctctagcacaaccactccccggaaacacaaccgaagccaccccccgctcgttacgcgcctccggctctctgtgcggtccacatgcgaaggcgccttacctgtgtgaagccacacacgaacccgccgccgcccgaattcgagcacaggtaccagatactcgctggtctcgcgtgggtggacaaagattttactctcgcgttctctctcccctgcacagaggtcccagcggccatacagaggcatcagcgcagaggtcacacatgggcaaattgaaggagccacaaccccaggatcataaacccggcttaggagcatcctag

SEQ ID NO: 14933 - RNA, 228 nt, synthetic construct; identical to SEQ ID NO: 13294
  misc_feature 1..228: note = source = /note="Description of Artificial Sequence: Synthetic coding sequence"
  source 1..228: mol_type = other RNA

SEQ ID NO: 14934 - RNA, 1491 nt, synthetic construct
  misc_feature 1..1491: note = source = /note="Description of Artificial Sequence: Synthetic coding sequence"
  source 1..1491: mol_type = other RNA
atggcccctgctaggactatggccagagcccgactggccccggcagattgtttgaattcctttaccgcaggtgtccctggcttcgtcttagataccaacgccagcgtgtcaaacggcgctacattcttggaatcccccaccgttagaagaggctgggactgcgtaagagcctgttgcacaacccagaattgcaatcttgctctcgtcgagctacaacccgatagaggagaggatgccatcgctgcctgtttcctgattaactgtctgtacgagcagaattttgtatgcaaattcgcaccccgagagggctttattaactacctcaccagagaggtctaccggtcttatagacagcttcgaacacagggttttggaggatctggcatacccaaggcatgggctgggatagacctgaaagtgcaaccacaggagccacttgtattgaaggacgttgagaacacggactggcggttacttcggggagacacagacgtaagagttgagcgcaaggacccaaaccaggtcgaactatggggactgaaagagggcacatacctgttccaactcacagtgacttccagcgaccaccccgaggataccgccaatgtgacagttacagttctgtccacgaaacagaccgaggattattgcctggcatcaaacaaggtcggcaggtgccgcgggtccttccctagatggtactatgatcccacagagcaaatttgcaaatcatttgtatatggaggctgtctcgggaataaaaataattatcttagagaagaggagtgcattctggcttgtcgtggcgttcaggggggccccctgcgggggagctccggtgcccaggcaacattcccccaaggacctagtatggaaagaagacatcccgtgtgctccggcacatgccaaccaactcagttccgatgctctaatggctgctgcatagatagtttcctagagtgcgatgatacacccaactgtccggatgcttctgacgaagcggcctgcgaaaagtacacctccggctttgatgaactgcagaggattcactttcctagcgataagggtcactgcgtcgatttgcccgatacagggttgtgtaaagagtctatccctagatggtattacaatccgttctccgagcattgcgcgagattcacatacgggggctgttatgggaataaaaacaacttcgaggaagaacagcaatgccttgaaagctgtagggggatttctaaaaaagacgtcttcggattgcggagagaaatcccgataccatcaaccggatcagtcgaaatggcagtcgcagtttttctggttatctgcattgtagtagttgtagccattctgggctactgcttttttaagaaccagagaaaggattttcacggtcaccatcatcatccacctccaacaccagccagctcaacagtcagcactacagaagatactgagcacctcgtttacaaccataccacacggccactctag

SEQ ID NO: 14935 - RNA, 528 nt, synthetic construct
  misc_feature 1..528: note = source = /note="Description of Artificial Sequence: Synthetic coding sequence"
  source 1..528: mol_type = other RNA
atgccacccggaacccgcgcatgtcgtgtgcccaggcctggtagacgcgcacctcggcctagaagagatggagagcctggtggtcatggggtggcccctgcctccgctgaagaagtgggagcgcggccaggtctgcgagccgtggcccggctgctccctcaacagcacctccaggcaggatatgtgtgtgaaagaaaagacctcctggttaatggttgctgcaacgttaacgtacctagcacgaaacagtactgttgtgacggatgctggccaaatggctgttgctccgcctacgaatactgtgtgtcctgttgtctgcagcccaacaaacagctacttctcgaacgcttcctgaatcgcgccgctgttgcctttcaaaatctgttcatggcagtcgaggaccatttcgaactgtgcttagccaagtgtagaacatcctcacagtcggtccagcatgaaaatacctaccgagatccaattgcgaagtattgttatggggagtcaccacctgagctttttccagcttag

SEQ ID NO: 14936 - RNA, 1881 nt, synthetic construct
  misc_feature 1..1881: note = source = /note="Description of Artificial Sequence: Synthetic coding sequence"
  source 1..1881: mol_type = other RNA
atggaccttgtgctgaaaagatgccttctccatctggcagttatcggcgcactgctggctgtcggcgccaccaaagtgcccagaaaccaggattggctaggcgtttctagacaactcaggacaaaagcctggaaccgacagctgtaccccgagtggacggaggcccaaagacttgattgttggcgcggtggacaagtaagccttaaggtgtctaacgatggccccactctgataggtgctaatgcctcgtttagtatcgccctcaactttccaggctcacagaaagtgctccctgacggtcaggttatatgggttaataataccatcattaatggcgaccaggtgtggggaggccagcccgtatacccacaagaaaccgacgacgcgtgcattttcccagacggcggtccatgccctagtggatcctggtcacagaagcggagttttgtctacgtatggaagacctggggtcagtactggcaggtactcggtggccctgtgagtggtctttctatcggaaccggacgtgccatgctgggaacacacaccatggaggtaactgtctatcatcgaagagggagccggtcctacgtgcctctcgctcattcatcatcggcatttactataaccgatcaggtcccattcagcgttagcgtttcacagttacgcgctcttgacggtggcaataagcattttctgagaaatcagcctttgacgttcgctttgcagctgcatgacccctcaggctacctcgccgaagcagatctaagttatacgtgggatttcggagactcatccggcacactcatctctagagcactggtcgtaacccatacatacctggagccaggtcccgtcaccgctcaggtggttcttcaggctgctatccccttaacttcttgcggctcctctccagtgccaggaactactgatggccacagaccgactgccgaagcccctaatactactgccggccaagtccccacaactgaggtggtcgggaccacacccggccaggcccctactgctgagccttccggaaccaccagcgtccaggtccctacgacagaggtaatctcaaccgcccctgtgcagatgccaaccgcggaatcaactgcagcccaagttactacaaccgaatgggtggagaccactgctcgtgagcttcccattccagagcccgaaggtccggatgcttcttccataatgtcaacagaatcaatcactggtagtctgggtcctttactggacggtaccgcaacccttcgtctggttaagcgccaggtgccactggactgtgtgctttataggtatggctcgttctccgtgactctggatatcgtccagggaattgaatccgctgaaatcttacaggcagtgccaagtggggaaggcgatgctttcgaactgacagtctcctgccaaggtggcctcccgaaagaagcctgcatggaaatttcttcacccggatgccagccgcccgcccagaggctgtgtcagccagtgctcccatcccccgcatgtcagcttgttctgcaccaaatactcaaaggcgggtccggcacatactgtctgaatgtaagtcttgcagacactaactcccttgccgtcgtgtctactcagttaataatgcccgtacccggcatcttgctgactggccaagaagcgggactgggccaggtccctctaatcgtggggatccttctggtgttaatggctgtggtactggctagcctgatatatcggcggcggctcatgaagcaggacttttctgttcctcaactgccccacagtagtagccattggctcagattaccacgaatcttttgctcctgccctattggcgaaaacagcccattactatctggacaacaagtgtag

SEQ ID NO: 14937 - RNA, 1611 nt, synthetic construct
  misc_feature 1..1611: note = source = /note="Description of Artificial Sequence: Synthetic coding sequence"
  source 1..1611: mol_type = other RNA
atgcctactctctgctctagtttcggtcttcaagtgctactaccggagtacctcagagaacggttcgttgcggctgccctttcgtatataacatgttcgagtgagggcgaacttgtatgtaaagagaacgactgctggtgcaaatgcagccccaccttccccgagtgcaattgccccgatgcagacatacaagcaatggaagattccctcctgcagatccaggatagctgggcgactcacaacaggcagttcgaggaaagcgaggaatttcaggccctactcaaacgcctgcctgacgaccggtttcttaattcaacggctatttctcagttctgggctatggatacctcattacaacacaggtaccagcaactaggagcaggactcaaagtgttattcaaaaaaacccatcggattctgcgccggctctttaatctctgcaaaagatgccatagacaaccccgctttaggttgcctaaagagtcctcccctcgaagcctcagctattggtggaacaggatacaaagcttgttgtactgcggcgaatctacttttcctggcacgtttctagaacagtctcattcctgcacctgtccttacgatcagagttcatgtcagggccccataccgtgtgctctgggtgaaggacccgcgtgtgcccactgtgcccccgacaactctacaagatgcggctcttgtaaccctggttacgtcctagctcaaggactgtgtagacccgaggtcgcagagagtcttgagaactttttgggccttgaaaccgacctgcaggacctggaattaaaatacttgctgcagaaacaagattcacgcattgaagtacacagcattttcatctcaaatgatatgagattaggttcatggttcgacccaagctggaggaaaagaatgttgcttaccctgaaatcaaataagtacaaaccaggtttggtgcacgtgatgttagctctgtccctccagatctgcttgaccaaaaacagtacactcgaaccagttatggctatctacgtgaaccccttcggcgggtcgcattctgaaagttggttcatgcctgtgaatgagggtagcttccccgattgggaacgaacaaatgtcgatgccgctgcacaatgtcagaactggactattacattaggcaaccgatggaaaacattttttgagaccgtccacgtctatttacgatccagaatcaaaagcctcgacgactcttccaatgagactatctattacgaaccccttgaaatgacagatcctagtaagaatctcgggtatatgaaaattaacaccctccaggtgttcggttattcccttccatttgatccagacgcaattagagacctgattctccagctagattacccctatacacaggggtcacaggacagcgcgctacttcagttgattgagctcagggaccgtgttaaccagctcagtccgccaggcaaagttaggttagaccttttctcatgccttctaagacaccgcctgaagctcgctaacaacgaagtcggacggatccagtctagccttagggcattcaatagcaaattgccaaatcctgtggagtacgaaactgggaaactctgctcatag

SEQ ID NO: 14938 - RNA, 423 nt, synthetic construct
  misc_feature 1..423: note = source = /note="Description of Artificial Sequence: Synthetic coding sequence"
  source 1..423: mol_type = other RNA
atgtcccagagcatagaagtcctcaatcttaggacccaacgagatttccagtacgtgcttaagatggaaacccagatgaagggactaaaagccaagttcagacagatcgaagacgaccgcaagactctcatgaccaaacatttccaggagctgaaagagaagatggacgaactgctgcccctaattcccgtgctagagcaatataagactgacgcgaaattaattacacagttcaaggaggaaatacggaatctttccgcggtgctgaccggtatccaagaagagatcggggcctatgactacgaagagttgcaccagagagtgttaagcctggaaactagattacgggattgtatgaagaaactgattgatcttaaaaaacggaaagaggaagagaagcgccagcagaagggggaggcatag

SEQ ID NO: 14939 - RNA, 1119 nt, synthetic construct
  misc_feature 1..1119: note = source = /note="Description of Artificial Sequence: Synthetic coding sequence"
  source 1..1119: mol_type = other RNA
atggcctatattgaacagagaagaattagccatgaaggctctcctgttaagccagttgccatcagagaattccagaaaactgaggatatgcgccggtacctccatcaaaaccgagtgcccgccgagccctctagtttgctcagcctatccgcttcgcataaccagctttctcataccgacctggagctacatcaaagacgcgagcagctagtcgaaagaacaaggagggaagcacagctcgctgcattgcagtacgaggaggagaagattcgcacaaagcagatccagcgagacgctgttctagatttcgttaagcaaaaggcttcccaatctccacagaagcagcaccctttgttagacggagtggacggcgaatgccctttcccctcaagacgcagccaacataccgatgacagcgcactctgtatgtccttgtccggcctaaaccaggtcgggtgtgccgctaccctcccgcactcatcagccttcacacctctcaaaagtgacgacaggccaaacgcccttttgagttctcctgccaccgaaacagtccaccattccccggcctactctttcccagccgctattcaacgtaaccagcctcagagaccagaaagctttctgtttcgtgccggcgtccgtgccgagacaaacaagggccatgcatcacccctgccccccagcgctgccccaactaccgacagcacagactctataacaggacagaattccagacaaagggaggaggaattagaactcattgaccagctgcgaaaacacatcgaatacaggctgaaggtttccctgccttgcgatttaggtgccgcactgaccgacggcgtcgttttatgtcacctcgctaatcacgtcagacctcgatcagtgccttctatccacgtcccaagccccgccgttccaaagctcactatggcaaaatgtcgacgtaatgtagagaatttccttgaggcctgtaggaagattggtgtgccacaagaacagctctgtctgcccctgcacatactcgaggaaaaaggactttcgcaggtagctgtcacagtccaagcacttcttgaattagcacctcctaaacagcaacaacatcaactatctgcagtgtag

SEQ ID NO: 14940 - RNA, 1242 nt, synthetic construct
  misc_feature 1..1242: note = source = /note="Description of Artificial Sequence: Synthetic coding sequence"
  source 1..1242: mol_type = other RNA
atggagaacatgttactgtggcttatttttttcaccccaggctggacactcatcgacggctcagagatggaatgggattttatgtggcacctacggaaggtaccaagaatcgttagtgaacgtacgttccacttgacctcccccgcattcgaagccgatgcaaagatgatggtgaatactgtgtgcggaattgagtgccagaaggagcttccaaccccctcccttagcgaactcgaagactacttgtcttatgaaacagtttttgaaaacggcaccaggactctgacccgggtgaaggtgcaagatctggtgctcgagcctacacagaacatcactactaagggggtctcggtgcggagaaaaaggcaggtgtacgggacagacagccgatttagcattttagacaaacgatttttgacaaattttccattcagtaccgccgttaagctgtcaaccgggtgcagcggaattctcataagcccacaacacgttctgaccgcagctcattgcgtccacgatgggaaagactatgttaagggctcaaagaagttgagggtaggcctcttaaagatgcgcaacaaatcgggaggcaaaaaacggagaggttctaaacggtccaggcgtgaggcaagcggaggtgatcaaagggaggggacccgagagcatctgcgggagagagccaaaggtggacggcgcagaaagaagtccggacgagggcagagaatagctgaggggagacctagttttcagtggaccagggttaagaacacgcacatcccaaaaggctgggcgcgcggtggcatgggcgacgcgactctagactatgattatgctctgttggaattgaagcgtgcccataaaaaaaagtacatggagttaggcatatcacctacgattaaaaagatgcccggaggaatgatacactttagcgggtttgacaatgatcgcgcggatcaactggtctacaggttttgcagcgtgagtgacgaatcaaatgatttactttatcagtattgcgacgccgaatctgggagtacaggaagcggcgtgtatctccgactgaaagatcccgacaaaaagaactggaaaagaaagatcattgcggtctattctggccatcagtgggtggatgtgcacggcgtccagaaggactataatgtggcagtaagaataacacccctcaaatacgcacagatttgcttatggattcatgggaatgacgcaaactgcgcttacgggtag

SEQ ID NO: 14941 - RNA, 2541 nt, synthetic construct
  misc_feature 1..2541: note = source = /note="Description of Artificial Sequence: Synthetic coding sequence"
  source 1..2541: mol_type = other RNA
atgttcaagtgttggagtgtagttctcgtgcttggtttcatatttctggaaagcgaggggcggcccacaaaagaaggcggctatggccttaagtcataccagcctttgatgcgactgaggcacaaagagaagaaccaggaaagtagtagagtgaaggggttcatgatacaggatggcccgtttggaagctgcgaaaataaatattgcggactcggccgacattgcgtgacatcacgggaaacaggacaagcagagtgcgcctgcatggatctgtgcaaaaggcattataagcccgtgtgcggcagcgatggcgagttttatgaaaatcattgtgaggttcacagagcagcttgtctaaagaaacagaagataaccatcgttcataatgaagactgctttttcaagggggataagtgcaagactacagagtattcaaaaatgaaaaatatgttactggatcttcaaaatcaaaaatacattatgcaggaaaatgaaaaccccaacggcgacgatatcagccgcaaaaaactgctggtggatcagatgttcaagtattttgacgcagatagtaatggcctcgttgatattaacgaactcacacaggtcattaagcaggaggaactgggcaaagacttatttgattgcactctgtacgttctccttaagtacgatgattttaacgccgataagcacctagccctggaagagttttatcgggcctttcaggttatacagctatcacttcctgaggatcagaaattgagtattacagccgccacagtaggacagtctgccgttttaagttgcgccattcaaggtaccctacgaccaccaatcatctggaagcgaaacaacattatccttaacaacctggatctcgaggatataaatgacttcggagacgatgggagcctctacattaccaaagttacgacaacgcacgttggtaattacacctgttatgctgacggatatgagcaagtgtatcagacccatattttccaagtcaatgtgccacccgtgatccgcgtttacccagagtcccaggccagggagcccggagtgactgcctccctccgctgccacgcagagggaatcccgaaacctcagctcggatggctaaagaatggcatcgacataacacccaaactctccaaacagttgactcttcaggccaatggaagcgaagtccatatcagtaatgtgcggtatgaagacacgggtgcttacacctgtattgctaagaatgaggcaggcgtggatgaggatatttctagtctgtttgtggaagactctgctcggaagacattggctaatattttgtggagagaggagggtttaggcattggtaacatgttttatgtattttacgaggacggcattaaagttatccaacccattgagtgcgagtttcagcgccatatcaagccaagtgagaagctgctgggattccaggacgaggtgtgcccaaaggccgaaggagatgaagtgcagcgttgcgtttgggcctcagcagtgaacgtcaaagataaatttatatatgttgcgcagcctaccttagatcgggtactaatcgttgacgtgcaatcgcagaaggtagtccaggccgtcagcacagaccccgtgccagtgaaattgcattatgacaagagccatgatcaggtatgggtcctgtcctggggcaccttagagaaaacctccccaacactccaggtcattactctcgcttccgggaacgtgccccatcataccattcatacccaacccgttggaaaacagttcgacagagtagatgatttctttatccccaccacaactctgattattacccatatgagattcggttttattcttcacaaggacgaggctgctctgcagaaaatcgatttagagaccatgtcttacatcaagacgattaaccttaaagactacaaatgcgtgccccagagcctagcttatacacaccttggcggctattatttcatcgggtgcaagccagatagcacaggtgccgtcagcccacaggtcatggtggacggagtaactgatagcgtgatcggcttcaacagcgatgtcacgggaaccccatatgtgtccccagatggacattacttggtaagcatcaatgacgttaaaggactcgtaagggtgcagtatatcacaatcagaggagagattcaggaggcctttgacatctatactaatttacatatttccgacctggctttccaaccctcatttaccgaggcacatcaatataatatttatggttcatcaagtacacagaccgacgtcctgtttgtcgagctgtccagcggcaaggttaagatgataaagtctttgaaggaacccctgaaggcggaagaatggccatggaatcgcaagaatcggcagatccaagactctggactgttcgggcaatatctaatgaccccttcaaaagattctttattcatactggatggaagacttaataaacttaattgcgagataactgaagtcgagaaagggaatactgtgatctgggtgggggacgcgtag

SEQ ID NO: 14942 - RNA, 582 nt, synthetic construct
  misc_feature 1..582: note = source = /note="Description of Artificial Sequence: Synthetic coding sequence"
  source 1..582: mol_type = other RNA
atgttaggagttctcgaactgctgctgctcggagcggcctggctggccggacctgctaggggacagaatgagacagagccaatcgtgctagaagggaaatgcttagtggtgtgtgattctaaccccacctccgaccccacaggcaccgcccttggcatcagcgttagaagtggttcagccaaagtggcattctccgcaattcgatctacaaatcacgagcccagcgaaatgagcaaccgaacaatgatcatctatttcgaccaggttttagtcaatatcggtaacaattttgactcggagcgaagtacttttattgcgccaaggaaaggcatctattcatttaacttccatgttgtaaaagtatataatcgccagacaattcaggtttccctgatgttaaatggatggcctgtgatctcggccttcgcaggcgaccaagacgtgacccgtgaagcagcaagtaacggtgtgttgatacaaatggagaaaggagaccgagcatatctgaaactggaaagaggcaacttgatgggagggtggaaatactccacctttagtgggttcctggtattccccctatag

SEQ ID NO: 14943 - RNA, 813 nt, synthetic construct
  misc_feature 1..813: note = source = /note="Description of Artificial Sequence: Synthetic coding sequence"
  source 1..813: mol_type = other RNA
atgcacggctcatgttcattcttaatgcttctactcccgttactcctcctactggtcgccaccaccggtccagtaggggctctgactgatgaagaaaaacggctgatggttgaactgcataatctctaccgcgcacaagtgtctccaaccgcttcagacatgctgcacatgagatgggacgaagaactggccgccttcgcaaaggcatacgcaagacaatgcgtctggggacacaataaagaacgaggcaggagaggcgagaatctgtttgccatcactgacgaaggcatggatgtgcccctggctatggaagagtggcaccacgaaagagaacattataatttatcagcggctacgtgttctcctggtcaaatgtgtggtcactacacccaggttgtatgggctaagacagagcgcatcgggtgtggatcccatttttgtgaaaagcttcagggagtcgaggagaccaatattgaactgctggtgtgtaactatgaaccaccaggaaatgtaaagggcaagcgtccctatcaggaaggtaccccatgctcacaatgcccaagcggctatcactgcaagaattcactttgtgagcctattggatccccagaagacgcccaagacctgccttaccttgttactgaagccccatcctttcgcgccactgaagcctctgactcccgtaagatgggagcggagggtcctgacaagcccagtgtggtgtctggactcaattcaggtcctggacacgtgtgggggccccttctcggtttactcctccttcctccactggtgctagctggcatattctag

SEQ ID NO: 14944 - RNA, 702 nt, synthetic construct
  misc_feature 1..702: note = source = /note="Description of Artificial Sequence: Synthetic coding sequence"
  source 1..702: mol_type = other RNA
atggatcaggtcttcatgattgactctaaatgtgagtccggtaaaggccgttgcagctttaacccgaatgtcaatacagtcagcgttatgatcaacgaagagctcttcagtggaatgtatatagacttcatgggcacagacgccgccatttttcgcagcctgacaaaaagaaacgctgtaagaacagatcagcataattcgaagtggctctccgagccaatgttcgtggacgcacacgtgatccccgatggaaccgaccctaatgatgctaaagtctacttcttcttcaaagaaaaattgaccgacaacaatagaagcaccaaacagatccacagcatgatagctagaatctgtccaaatgatacgggcggactacgatcactagtgaataagtggactactttcctgaaggcgaggcttgtctgttccgtcaccgacgaggacggtcctgagacacactttgatgaactagaagacgtttttctccttgaaaccgacaatccgcgcacgacactggtatacggcattttcaccacctcttcttctgtgtttaagggaagtgctgtgtgcgtgtaccatctgagcgacatccagactgtgttcaacggacctttcgcccataaagaaggacccaatcatcagttaatctcttaccaaggtcgaattccctatcccaggcctgggaccaatacgtgtgtgtag

SEQ ID NO: 14945 - RNA, 1368 nt, synthetic construct
  misc_feature 1..1368: note = source = /note="Description of Artificial Sequence: Synthetic coding sequence"
  source 1..1368: mol_type = other RNA
atgctccatccagaaacctctcccggccgagggcatctcctggccgttctcctagcactgctgggaactgcatgggcggaggtttggcccccccagctgcaggaacaagctcccatggctggtgctcttaatcggaaagagagtttcctcctcctctccctccacaataggcttagatcatgggtccagccgcccgcagcggacatgagacgtcttgattggagtgactcattagcacagctggcccaggcccgggctgccctttgcggaattccgactccctccctcgccagcggactttggagaacgctgcaagtggggtggaacatgcaattgctgcccgcgggtctagcatccttcgtagaagtggtttctctgtggtttgccgaaggccaaagatatagtcatgccgccggcgagtgtgccaggaatgctacatgcacgcattatactcagcttgtatgggcaacatcttcacagctgggttgcggaagacatctttgctctgcaggtcaagcagcaatcgaagcgttcgtgtgtgcctattccccaagaggtaattgggaggtgaacggcaaaaccattgttccatataagaagggggcatggtgctccctttgcacagcatccgtctctggatgctttaaagcctgggatcatgccggcggcctctgcgaagtgccacgcaacccttgccgcatgtcttgtcagaatcatggtagattgaatataagtacttgccactgccactgtcctcctggctacaccgggcgttattgtcaggttcgttgctcactacagtgcgttcacgggcgatttcgtgaggaggagtgttcctgcgtgtgcgacattgggtatggcggagcacagtgcgcaactaaggttcactttccttttcacacctgcgacctgagaatcgatggcgattgcttcatggtaagtagtgaagccgacacctactaccgggctagaatgaaatgtcaacgcaaaggaggcgtgctcgcacagattaagagtcagaaagtacaggacattctggctttctacctagggagattggagacaaccaatgaagtgatcgactcggactttgagacaaggaacttttggatcggactgacttataagactgcgaaagactcgttccggtgggctacaggcgagcaccaagcatttacaagttttgcatttggccagcccgataatcacggactggtgtggcttagcgcggccatgggtttcggaaactgcgtggaactacaagcttctgctgctttcaattggaataatcagcgctgtaaaacgaggaaccgctatatttgtcaattcgcccaagagcatatttctcgctgggggccagggagctag

SEQ ID NO: 14946 - RNA, 462 nt, synthetic construct
  misc_feature 1..462: note = source = /note="Description of Artificial Sequence: Synthetic coding sequence"
  source 1..462: mol_type = other RNA
atggccagattctgggtatgtgtcgccggggccggcttttttctggcttttctggtcctccattctagattctgcggaagtccagtgctgagaaattttacttttgctgtctcatggcgcacagaaaaaatactgtacaggctcgacgttggttggccaaaacatcctgaatactttaccggaacaactttctgcgtcgcggtggactctcttaatggcctggtgtatattggccaaaggggggataacataccaaaaatcctcgtatttacagaagacggatactttctacgtgcctggaattatactgtagacacaccccacggtatcttcgccgctagcactttgtacgagcagtccgtttggatcaccgatgtgggctcagattttatgatcttatggttgcatggagaaaatgggaccggtccagccaagtttaacatcccccacagcgtgacctag

SEQ ID NO: 14947 - RNA, 375 nt, synthetic construct
  misc_feature 1..375: note = source = /note="Description of Artificial Sequence: Synthetic coding sequence"
  source 1..375: mol_type = other RNA
atgtggcgatgccccctcgggcttttgcttctgttgcctctggccggccacttagcacttggtgctcagcaggggagaggtcggagagaactggctcctggactccatctgaggggaatacgagatgccggagggagatactgccaggaacaggacctgtgctgtagaggaagggctgatgactgtgcactgccttaccttggagctatctgctactgcgatctcttctgtaaccgcactgtgtctgactgttgccccgacttttgggatttctgtcttggtgttccaccccctttccctccaatccaagcgccagcccgtagaaccggttctggatccgtcacaaagaatcatgcctggtggatacagacttag

SEQ ID NO: 14948 - RNA, 777 nt, synthetic construct
  misc_feature 1..777: note = source = /note="Description of Artificial Sequence: Synthetic coding sequence"
  source 1..777: mol_type = other RNA
atgaaaacactctatctcgctgatactttcccaactaacttcagggacagtgcgggtgccatgaaacaaataaacgattacgttgctaagcagacaaaaggaaagattgtagatttgttgaaaaatctggatagtaacgccgtggtcataatggtgaattatatcttcttcaaggccaaatgggaaacaagtttcaatcacaaaggaacccaggagcaggatttctatgtgacaagcgaaacagttgtgcgagtccctatgatgtcacgtgaagatcaataccactaccttttagacagaaacctgtcatgcagagtggttggggtgccctatcaaggcaacgcaactgcactgtttattctcccgagcgaaggcaagatgcagcaggtagagaacggactatcagagaaaacattgcgcaaatggctgaagatgttcaaaaagagacaattagaactatacctaccgaaattttcaattgagggttcctaccagctcgagaaagtcctcccatccttaggaatctccaatgtgttcacctcccacgccgatctcagcggcatttcgaatcacagcaatattcaggttagcgagatggtccataaggctgtggtagaagtagacgagtccgggacgagagccgcagctgccactggcacaatatttacttttcgctccgcgcgccttaattcacagagattagtttttaacagacccttccttatgtttatagtggataataatattttgttcttaggaaaagtgaaccggccttag

SEQ ID NO: 14949 - RNA, 1731 nt, synthetic construct
  misc_feature 1..1731: note = source = /note="Description of Artificial Sequence: Synthetic coding sequence"
  source 1..1731: mol_type = other RNA
atgattgtattcggatgggccgtctttctcgcctcaagatcacttggccagggcctcctgctcactctggaagagcacatagcacacttccttggtactggtggggctgcaacaacgatgggcaactcatgtatttgccgggacgatagtggcaccgatgacagtgtggacacccagcagcagcaggcagaaaacagcgccgtccccacagccgacacgcggagccagcctagagatccagttcgacctcctagaagggggaggggtcctcatgagccccgaaggaagaagcagaatgtcgatggtttggtcctcgatactttggccgtgataagaacactggtggataacgatcaagagcccccatactcaatgataaccctgcatgagatggccgagacggatgaaggatggttggatgtggtacagagcctgattagagtaattccacttgaggacccactcggaccggccgtaattaccctgcttctggatgaatgcccattgcccactaaggatgccctacagaaacttacagaaatactcaacctgaacggggaggtggcctgtcaggacagtagccaccctgctaaacacagaaataccagcgcagtactcgggtgtttagctgaaaaactggcaggtcccgctagcatcggccttctgagccctggaatcctcgagtaccttctacaatgccttaaactgcagtctcatcctaccgtgatgctttttgccttaatagccctggagaaattcgcccagaccagcgagaacaaattgaccatttctgagtcatctatcagcgaccgtctcgtgaccttagagtcatgggcaaatgatccagactacctgaaaagacaggtgggcttctgtgcacagtggtctttagataacttgttcttaaaagaggggagacaactgacttacgaaaaggtaaacctctcatcgattcgagccatgctgaattccaatgatgtgagcgagtatcttaagatttcaccacacggcctcgaggctcgatgcgatgcatcctcctttgagagcgtgaggtgcaccttttgtgtggatgcaggcgtatggtattatgaagttacggtggtcacaagtggggttatgcagatagggtgggcaacccgcgacagcaagtttcttaaccacgaaggctatggtattggtgatgacgagtatagctgtgcctacgatggttgcaggcagctaatctggtataacgcgagatcaaaacctcatatccacccctgttggaaggagggcgacacagtgggctttctgctggatctaaatgaaaaacaaatgattttctttctcaatggtaatcagttaccacccgaaaagcaagtcttctcatccaccgtatcaggatttttcgccgccgcttcctttatgtcctaccagcaatgtgagtttaactttggagcaaaacccttcaagtaccctcctagtatgaagttctccaccttcaacgattacgcctttctgaccgctgaggagaagatcatactgccaagacatagaaggcttgccctgctcaaacaagtgtcaataagggagaactgctgtagtttatgttgtgacgaggtcgccgacacacagctgaaaccatgtgggcacagtgatctctgtatggattgcgcacttcagttagaaacctgccccctgtgtcgcaaagaaatagtatcccggatacgccagatatcacacatatcttag

SEQ ID NO: 14950 - RNA, 1359 nt, synthetic construct
  misc_feature 1..1359: note = source = /note="Description of Artificial Sequence: Synthetic coding sequence"
  source 1..1359: mol_type = other RNA
atggccgatatgcaccggggctatgccgactcaccctccaaggctggcgccgctccatacgtccaggcttttgactctctccttgccggccccgttgccgagtatcttaaaatcagcaaggaaattgggggcgacgtgcagaaacacgcagagatggtgcatactgggttgaagcttgaacgcgccctcctcgtcactgctagccagtgccaacagcccgcagagaataagttgagcgaccttttggccccaattagtgaacagattaaggaagtcataacttttcgggagaagaaccgggggagcaagctgttcaaccatctgtccgcggtgtccgagagtatccaggcactcggatgggtcgcaatggctcccaaacctggtccatatgtcaaggaaatgaatgatgctgccatgttctacactaacagggtgctaaaggaatataaagatgttgacaagaagcacgtcgactgggtcaaagcatatctctctatctggacagagctacaggcctatataaaggaatttcacacaacagggttggcatggtcaaaaacaggcccagtggccaaagagttaagcggtctgccaagtggcccctcagccggatcctgtccaccgcctcctcccccttgcccccctccaccacctgtaagcacaatttcttgtagctacgaatctgcatcacgctcatctctcttcgcacaaatcaaccaaggcgagtccatcactcatgctctcaagcacgtatctgacgatatgaaaacgcacaagaaccccgcattgaaggcccaatccggacctgtgcgctccggcccaaaaccttttagtgcacctaaaccgcagacctctccttcaccgaaacgagccacaaagaaggaacctgctgtgttggaattagagggcaaaaagtggcgggtagagaaccaagaaaacgtttcaaatctggtgattgaggacacagagcttaaacaggtcgcgtacatctacaaatgtgtgaatacgactctgcaaatcaaaggaaagatcaacagcattactgtggacaattgcaaaaagctgggcttggtctttgatgatgtcgtgggtattgtcgaaataataaatagcaaagacgttaaggtgcaggtgatgggtaaagtgccaaccatatcgattaacaagacagacggttgtcatgcttacttgtcgaaaaattctttagactgtgaaattgtatcagctaaatcctccgagatgaacgtgctgattccaaccgaggggggtgattttaacgagtttcccgtccctgagcagttcaagactctgtggaatggacaaaagctcgtaactacagttacggaaattgccggctag

SEQ ID NO: 14951 - RNA, 1533 nt, synthetic construct
  misc_feature 1..1533: note = source = /note="Description of Artificial Sequence: Synthetic coding sequence"
  source 1..1533: mol_type = other RNA
atgggtagaccgacacagtggccttccctactgttacttctcctgctacctgggccccctcctgtcgccgggctggaggacgcagccttccctcacctcggcgaatcgcttcaaccactgccacgggcctgtccattacgttgcagctgccctcgtgtagacacagtagattgtgatggactggatctgcgcgtatttcctgacaacattacacgcgctgcacagcatttgtctttgcaaaataaccaactacaggaattaccatacaatgaactgtctcggcttagcggactacgcaccctgaacttacataataatctcatttcctctgaaggactcccagatgaagcatttgagtcccttacgcaactccagcacctgtgtgtcgctcacaataagctatcagtcgccccccagttcttacccaggagcctgcgcgtcgctgacctcgctgctaatcaggtgatggagattttccccttgacgttcggtgaaaaaccagctttgcggtccgtgtaccttcataacaaccagctctccaatgccggtcttcccccagatgcctttcgcgggtcagaagcaatcgccaccctgtcgctttcaaataaccaactctcttatctgcctccttccttacccccatctctcgagaggctccacctgcagaacaatctgatttctaaagtgccacgaggagcgttatcacggcaaacccaactgcgcgaactctacctacagcataatcagctaaccgattctggcctagatgcaaccacctttagtaaattacactcgttggaatacctggatctaagtcacaatcagctgacgacagttcctgctggtctcccccggacgcttgccatcctgcacttaggccgcaatcgcatacgacaggtagaagcagctagactccacggagcccgcggattgagatatctcctgctgcaacataaccagttggggagtagtggactgccagccggtgccctcaggccacttcgcggcctgcatacgcttcacctgtacggaaatggcctggatagagtgccacccgcactccctagacgccttcgtgccctggtcctgcctcacaatcacgttgcagctctgggagcaagggatcttgtggcgactcctggcctgactgagctaaatcttgcctataatagactggcctctgcaagagtccatcaccgtgcattcaggagattacgtgctttacgatcactcgatctggcagggaaccaattaaccaggctgcctatgggactgccaactggtctgcggacactgcaactgcagaggaatcagctacgcatgttagaaccggagccgcttgccggcctggaccaactcagagagctttcgttggctcataatcggctgcgcgtgggggatataggccccggaacttggcatgaactgcaagctctgcaggtgcggcatcggctggtgtctcatactgtacctagagctccacccagtccatgtttaccctgtcacgtacccaatatcttagtcagctggtag

SEQ ID NO: 14952 - RNA, 114 nt, synthetic construct; identical to SEQ ID NO: 13313
  misc_feature 1..114: note = source = /note="Description of Artificial Sequence: Synthetic coding sequence"
  source 1..114: mol_type = other RNA

SEQ ID NO: 14953 - RNA, 1266 nt, synthetic construct
  misc_feature 1..1266: note = source = /note="Description of Artificial Sequence: Synthetic coding sequence"
  source 1..1266: mol_type = other RNA
atgggcaggccgactcaatggccctctcttttacttctgttgttactccctggccccccacctgtggccggacttgaagacgctgccttcccacacttaggcgaatcactacagcccctacctcgagcctgcccactacgatgtagttgccccagagtcgatacggttgactgcgatggcttagacctgagggttttccctgataatattacacgagcggcacagcacctaagcctccaaaacaatcagctgcaggaattaccatataacgagctgtcccgtctgagcggcctgagaactctgaacctccacaacaatcttatttccagtgaaggcctgccagacgaagcctttgagtctcttacacagctccagcatctgtgtgtcgcccataacaagaataatctcatcagtaaggtgccaagaggtgccctatccaggcagacgcagcttcgcgagctctaccttcaacataatcaactcactgatagtggtcttgatgccacaaccttttctaaactgcactcactggaatatcttgatttgtcccacaatcagcttaccactgtccccgccggactaccaaggacgcttgccattttgcatctggggagaaaccgaattagacaagtcgaagctgctcggctccacggagcaagaggtctacgataccttttactgcagcacaaccagctaggctcctccggactgcctgcgggcgctctccgtcctttgcgcggtttacatacgctacatctttacggcaacggcctagatcgggttccacctgccctgccgcgtagattgcgcgcccttgtcctgccccacaatcatgtggctgcgctcggggcccgggacctagtcgcaacccccggacttaccgagctcaatttggcctataacaggctagcatccgccagggtccaccacagggcatttcggcggctacgtgctcttcgctctcttgacctggcgggcaaccaactgactagactgccaatgggtttgcccactggcctccgaaccttacagttgcagcggaatcagctgcggatgctcgaaccagaacccttagccgggctggatcagttgcgggaattatcactggctcacaatagattgagagtaggggacattggacccggcacttggcatgaattgcaggcactgcaggtcagacatcgactcgtttctcacacagtacctcgcgctccccctagcccatgtttaccctgtcacgtgcccaatatcctggtttcctggtag

SEQ ID NO: 14954 - RNA, 993 nt, synthetic construct
  misc_feature 1..993: note = source = /note="Description of Artificial Sequence: Synthetic coding sequence"
  source 1..993: mol_type = other RNA
atgtcctcatggtcacgacagcgaccgaaatcaccgggggggattcagccacatgttagtcgcacactattcctacttctcctcctcgcagctagcgcctggggggtaactctttccccaaaagattgtcaagtgtttcgcagcgaccatggctcctctatatcctgccagccacctgcagagatccccggctacttacccgccgatactgttcatttggctgtggagttttttaatcttacccacttgcctgcaaatctgttacagggcgcctctaaactgcaggagctccacctaagcagcaatggcttggaatccctatcccctgaattcctccggccggtccctcagctgagagtgctagatcttactaggaatgccctcgttctcaaagaaaatcagctggaagtgctcgaagtctcatggttacacggactgaaagccctcgggcacctcgacctaagcggaaatcgtctgcgcaagctccctcctggtttacttgcaaactttactctgctgaggacgctggacttaggcgagaaccaactggagacactcccccctgacttgctacgtggaccgctacaattggaacgtctacatctggagggtaacaagcttcaggtcctcggcaaagaccttctgcttcctcaacctgatctccgctacttattcctaaatggcaacaagctcgcccgcgtggccgctggcgcatttcaaggactccggcagctggacatgctggacttgagtaacaatagtctcgcgagtgtaccagaaggactgtgggcttctttgggtcagccgaactgggacatgcgtgatggcttcgatatctccggcaatccatggatttgtgaccagaacctgagcgacctctatagatggctgcaggcccagaaagataagatgttctctcagaatgatacacggtgcgcaggacccgaagcggtcaaaggtcagactctcttggcagtggctaaaagtcagtag

SEQ ID NO: 14955 - RNA, 1815 nt, synthetic construct
  misc_feature 1..1815: note = source = /note="Description of Artificial Sequence: Synthetic coding sequence"
  source 1..1815: mol_type = other RNA
atgatgagggccgtgtgggaagcactcgccgcccttgccgcggttgcttgcctagttggcgccgtgcgggggggacccgggttatcaatgtttgcaggacaagccgcccagcccgacccatgctccgatgagaacgggcatccacgtcgatgcatccctgactttgtaaatgccgcattcgggaaggatgtcagagtgtcttctacctgcggacgccccccggccaggtattgtgtggtttccgaacgaggcgaggaaaggctgagaagttgtcatctttgcaacgcatcagacccaaaaaaggcccacccccctgccttcctcaccgatctaaataatccgcataatttaacctgttggcaatcagagaactatctgcagtttcctcacaatgtgactctgaccttaagcctgggcaagaaattcgaggtaacctacgtctcacttcaattctgttcacctagacccgaatctatggcaatatacaagtccatggattatggcagaacatgggtgcccttccagttctactcaactcagtgtcggaaaatgtataatagacctcacagagccccaattactaagcagaatgaacaagaagcagtctgcacagactcacacaccgatatgagaccacttagtgggggccttatagctttcagtaccctcgatggccgaccatccgcacacgactttgataacagccctgtgcttcaggactgggtgacggcaacagacattagagtggcgttttcccgacttcacacttttggggacgagaatgaggacgattccgagttagcgagagactcttacttttatgccgtgagcgatctgcaagttggaggaaggtgtaaatgtaacggacacgccgccagatgtgtgcgggatagggatgattcattagtatgcgactgccgacacaacaccgccgggcctgaatgcgatagatgcaaacccttccattatgatcggccctggcagagagccaccgcaagagaggcaaacgaatgtgtcgcctgcaattgcaacttacatgccaggagatgtcgttttaacatggaattgtacaaattaagcgggagaaagagcggaggcgtgtgccttaattgtcggcacaatactgctggaagacattgccactattgtaaagaaggatactacagggatatggggaaacccatcacacaccggaaagcctgtaaggcctgtgactgccatcctgtcggggccgccggaaagacatgcaaccagactacaggacagtgtccatgcaaagatggcgttaccggcatcacatgcaacagatgtgcaaagggataccagcagtcacgaagtcccatcgccccctgcataaaaatcccagtcgccccccctaccaccgctgcaagcagcgttgaagagcctgaggactgtgattcttactgcaaagcgagcaaaggcaaattaaagatcaatatgaagaagtactgtaagaaagattatgctgtccaaatccacatcctgaaggcagacaaggcaggggattggtggaagtttacagtaaacattatttccgtatacaaacagggaacaagcaggatcaggcgaggggaccagagtctgtggataaggagtcgtgatattgcttgcaaatgtcccaaaatcaagcctcttaaaaagtatttactgctgggcaacgccgaggacagcccagatcagagcggtatcgtggcagataaatcatcactcgtcatacagtggcgtgacacctgggcacgacggctgaggaaattccagcagagggagaagaaagggaagtgtaaaaaagcttag

SEQ ID NO: 14956 - RNA, 948 nt, synthetic construct
  misc_feature 1..948: note = source = /note="Description of Artificial Sequence: Synthetic coding sequence"
  source 1..948: mol_type = other RNA
atggggcaagaccgagaagaaacaaatatagaacttttagtgtgcaattacgagcccccaggaaacgtgaaaggtaaaagaccctaccaagagggaactccctgttctcaatgcccaagcggataccattgtaaaaatagcttatgcgagcctatcggctcccctgaggacgcccaggatctgccatatcttgtcacagaagccccatcatttagagcaaccgaggcctccgattctcgcaagatgggaacaccctcctccttggcaaccggcattccagcatttctcgtcacagaggtgtccggatctcttgccactaaagctctgcccgctgtcgaaacccaggccccgacgtccttagccaccaaagaccctccatccatggctaccgaggccccaccatgtgtaacaaccgaggtcccctctattctggccgctcactctctaccatcattagacgaagaaccagttaccttccctaagagtacccacgtccctatcccaaaaagcgcagataaagtcactgacaagaccaaggtcccgtccaggtcccctgaaaactcgctggacccgaagatgtccttgactggagctcgcgagctgttgccacacgcgcaggaggaagctgaagcggaggcggagctccctccaagcagtgaggtgctcgcatcagtctttccggcacaggataagcccggcgaactgcaggcaacgctagatcatacaggtcacactagctccaagagtttaccaaatttccctaacacttcagctaccgcaaacgcaacaggcggcagagcccttgcattacagtcctcacttcctggggcagaaggtccagataaacctagcgtggtaagcggcctgaactccggacctggacatgtttggggcccactgttgggactgttgctccttcctcctctcgtcctcgccggcatattttag

SEQ ID NO: 14957 - RNA, 207 nt, synthetic construct; identical to SEQ ID NO: 13318
  misc_feature 1..207: note = source = /note="Description of Artificial Sequence: Synthetic coding sequence"
  source 1..207: mol_type = other RNA

SEQ ID NO: 14958 - RNA, 3369 nt, synthetic construct
  misc_feature 1..3369: note = source = /note="Description of Artificial Sequence: Synthetic coding sequence"
  source 1..3369: mol_type = other RNA
atgagtctacaagagatgttccgctttcccatgggactgctccttggctcagttctgctggtcgcctcagcccccgccaccctggaaccacccggatgttctaataaggaacagcaagttactgtgagtcatacctacaagatagacgtgcctaaatcagccctggtgcaggtagacgcggatccccagcccctaagcgacgacggcgcctccttgttggccttgggcgaagctcgcgaagaacagaacataatctttaggcacaacatcagactgcagactccccagaaagattgcgagctggcaggcagcgtgcaagacctgctcgctagggtgaagaaactggaggaggaaatggtggagatgaaagagcaatgttccgcccagagatgttgtcagggtgtcacggatttgtctcgccactgctcaggacatggtacttttagcttggaaacttgtagctgtcactgcgaagaaggaagagagggcccagcttgcgagcggctggcctgccctggggcgtgttcagggcatgggaggtgtgtggacggccgttgtctctgtcatgaaccctatgtgggggctgattgtggatatcccgcctgtccagaaaattgttcgggtcatggagagtgcgtaaggggcgtgtgtcagtgtcacgaagactttatgtctgaggactgtagcgaaaagagatgccccggcgattgtagtggacacggattctgtgacaccggggaatgctattgtgaggagggtttcaccggactagactgcgcacaagtagtgactccccaggggctacaactgttgaaaaataccgaagactcactgctcgttagctgggagccaagctcacaggttgaccactatctcttatcttattaccccctgggaaaggagttgtccgggaagcaaatccaagtgccaaaagaacagcattcctacgagatactgggactcctcccaggcaccaaatacattgtcacgttgcgaaatgtcaagaacgaagtgagctctagcccccagcacttgcttgccacaacagatttggccgtgttgggtacagcctgggtcacggacgaaaccgagaattccctggatgtggagtgggaaaacccaagtaccgaggtcgactactacaaactgcgctatggcccaatgaccggtcaggaggttgctgaggtcactgttccgaagtcttccgatcctaagtccaggtatgatataacaggtctgcaccccggaactgaatataagatcaccgttgtgccaatgaggggagagcttgagggcaagcccatactcctgaatgggaggacagaaatagatagcccgaccaatgttgtgactgaccgcgtcaccgaggatacagctacagtctcttgggacccagtgcaggcagtgatcgacaagtatgtggtaagatacacttcagctgacggagatacaaaggaaatggccgtgcacaaggatgagtcaagtaccgtgctaacgggacttaaaccaggcgaagcttataaggtttacgtgtgggcagagaggggaaaccaaggctcaaagaaagctgacaccaacgcacttactgaaatagactcccccgccaatctggtgaccgatcgggtaactgaaaacactgccacaatctcttgggatcctgtacaagctaccatcgacagatacgtggtgagatatacttccgctaaagacggagagacccgtgaggtgcccgtggggaaagaacagtccagcactgtcttgaccggcctgagacccggagtagaatatacagtccatgtatgggcacaaaaaggcgctcaggaaagtaagaaggccgatacgaaagcacagactgatattgactcacctcaaaatctcgtgactgattgggtcacagagaacactgcaacggtcagttgggatcctgtgcaggctaccatcgatcgatatgtagtccattatacatctgccaatggagagacacgcgaagtacccgtcgggaaggaacaaagcagcacagtacttacagggcttagaccggggatggagtacacagtccatgtctgggcacaaaaaggaaatcaggaaagtaaaaaagctgacaccaaagctcagaccgagatcgatggtccaaaaaatcttgtcacagattgggtcactgagaacatggcaactgtatcctgggaccccgttcaggccacaatagacaaatacatggtgagatatacctcagctgacggtgagacaagagaagtgcccgtgggcaaagagcactcttctacagttcttaccggccttagaccagggatggaatacatggtgcacgtttgggcgcaaaaaggagcacaggagagtaagaaagcagacacgaaagcccaaacggagctcgaccccccgaggaatctccggccttctgcagtgactcagagtggaggaatactgacatggacgcctccatccgcccaaatccatggctacatccttacataccaatttccagacggaacagtgaaagaaatgcaacttggcagagaagaccagcggttcgccctgcaaggcttggagcagggggcaacctatcctgttagcctggtggcgtttaagggcgggcgtcgttcacgtaacgtgtcaacaaccctttccacagttggcgctcgcttcccccatccatcggactgctcgcaagttcaacagaattctaacgccgcctcagggttatataccatatatcttcacggtgatgcatccaggccgttacaagtctactgcgatatggaaactgacggaggtggttggattgtctttcagagacgaaatactggccagctcgacttcttcaagcgttggaggagttatgtggaggggttcggcgatcccatgaaagaattttggcttggacttgacaaactccataatctgaccactggaaccccggccagatacgaggtgagagtcgacctgcagacagccaatgaaagtgcttacgccatatatgattttttccaagtcgcctcaagtaaagagagatataaattgacagtcggaaagtatcgagggaccgctggcgatgccttgacttaccataatgggtggaagtttactacatttgaccgcgataacgacatagccctgtcgaattgcgcattaacacatcacggaggatggtggtataaaaattgtcacctggcaaaccccaacggaagatatggggaaaccaaacactctgaaggcgtgaactgggaaccttggaaggggcacgaattttccataccgtacgtggagctcaagattagacctcacggctacagccgggagcctgtgttgggtcggaaaaagagaacattgaggggtagattgcgtacattttag

SEQ ID NO: 14959 - RNA, 897 nt, synthetic construct
  misc_feature 1..897: note = source = /note="Description of Artificial Sequence: Synthetic coding sequence"
  source 1..897: mol_type = other RNA
atgctgcatcctgagacatcgcccggtcgcggtcatcttctggctgtccttctagcactgcttggcaccgcatgggcggaggtgtggcctcctcagctgcaagaacaagctcccatggcgggagcccttaatcgaaaagaaagtttcctgttgctatcattacataatcgtttaaggagttgggttcagccacctgctgcagatatgaggcgcctcgattggagcgattcattgaactggctgaagcctggcccgttatggaatcctaaccccgagcctggggtgaggcctgttgcacatcctgcttctggactggagcacgccgcctgcccaagagcctggcgaccgttattgaagtggagcctgtggttcgccgaaggtcaaagatatagccacgccgccggagaatgcgctcgtaacgccacttgtactcattacacacaactggtgtgggctacttcttcccagttaggctgtggtaggcacctctgctcagccgggcaggccgcaatagaggcctttgtgtgtgcatactcccctagaggtaactgggaagttaatggaaagacaattgttccttataagaaaggagcctggtgcagtctctgtactgcatcagttagtggctgctttaaggcttgggatcacgcgggcgggctatgcgaagtgccaaggaacccgtgccgtatgagctgccagaaccatggacgtcttaatattagcacctgtcactgccactgtcctccgggttatactgggcggtactgtcaagttcggtgttctctgcaatgcgtgcacggcaggttccgcgaggaagaatgttcatgcgtctgtgacattggatacgagccatccgttcccccgagatgtatttttccatctactcccgtcacatag

SEQ ID NO: 14960 - RNA, 1728 nt, synthetic construct
  misc_feature 1..1728: note = source = /note="Description of Artificial Sequence: Synthetic coding sequence"
  source 1..1728: mol_type = other RNA
atggacttggtcctaaaaagatgcttgctgcacctcgcagttatcggggctctgctggcagttggagcaacaaagggaagtcaggtgtggggtggccagcctgtgtacccccaagaaacagacgatgcatgtatcttcccagatggcggcccctgcccttctggcagctggtcacagaagcgctcctttgtctacgtatggaagacttggggacaatactggcaggtactcggtgggcccgttagcggcctgtccataggaaccggacgtgctatgctggggacacacacgatggaagtcaccgtttatcaccgccggggctcaagatcttacgtccccctggcacacagctcctctgcattcactattaccgatcaggtcccattcagtgtttctgtgtcacagttacgggctttagatggaggcaataaacactttttacggaatcagccgcttaccttcgccttgcagttacatgatccctccggatatctcgccgaggcagacctctcatacacttgggactttggtgattcttctggcaccctcatttcccgcgcgctggtggtgactcacacatacctcgagccgggcccagttacggctcaggtcgtgctccaggctgccatacccctaacaagttgtgggagctcccctgtgccaggtaccactgatggccaccgtcctaccgccgaggcacccaacactacggccgggcaggtgccaacaaccgaggtcgtgggaaccaccccgggtcaggcacctacagctgaacctagtggaaccaccagtgtccaggtcccaacaacagaggtaatttcaaccgcccccgtgcagatgcccaccgcagaatcaaccggcatgaccccagagaaagtgcctgtaagtgaagtcatgggcacaacattagcagagatgtcaaccccagaagcgaccggcatgacgcccgctgaagttagtattgtcgttctgtcagggactacagcagcccaggttacaacaactgagtgggtagaaaccacagcacgtgagctcccaatccccgagccagagggccccgacgcctcttcaatcatgtccaccgaaagtatcactgggtccctcgggcccttgctggacggcaccgccaccctcagactggttaagcgccaagtgcccctagactgtgtgctttataggtacggaagctttagtgtcaccctcgatattgtacaggggattgagtcagccgagatcctccaggccgtcccatcaggcgagggagatgcgttcgaactaaccgtttcctgtcaaggcggactcccaaaagaggcttgcatggagatcagctcacctggctgccaaccgccagcccagcgtctgtgtcagcccgtcctcccttctccggcctgtcagcttgtgcttcatcagattctcaagggtggatctggaacctactgcctcaacgtctctcttgccgatacaaactctcttgccgttgtgagtactcaacttattatgccagggcaggaagccggcttaggccaggtccccctaatcgtaggcatactgctcgtacttatggccgtcgttctggcctccctgatctatcggagacgccttatgaagcaagacttttccgttccacagttgccccattcaagctcccactggctccgccttccccgaatcttctgttcgtgtccgatcggtgagaactctcctctgctcagcggtcagcaagtctag

SEQ ID NO: 14961 - RNA, 330 nt, synthetic construct
  misc_feature 1..330: note = source = /note="Description of Artificial Sequence: Synthetic coding sequence"
  source 1..330: mol_type = other RNA
tagtcaggacagtctctgaaaagcctcaatgcctccagtggtcacctcgcactgatcctatccagtatatttggcctgttacttctagtccttttcatcttatttttgacctggtgtagggtccagaagcagaaacacctccccctgagggtgtccactagaagacgtggcagtctggaagagaacctctttcacgagatggagacctgcctaaaacgagaggacccacacggaacgagaacaagcgatgacacccccaatcacggctgtgaagatgcctcagatacatcccttctgggggtattacccgcctccgaagccactaagtag

SEQ ID NO: 14962 - RNA, 312 nt, synthetic construct
  misc_feature 1..312: note = source = /note="Description of Artificial Sequence: Synthetic coding sequence"
  source 1..312: mol_type = other RNA
atgtcaggaaggggcaaaggagggaaaggcctgggaaaaggcggagctaaacgacacagaaaagtgcttcgggacaacattcagggcatcacgaagcctgctatccggagacttgctagaagaggcggagtgaaaagaatctccggccttatttacgaagagacaagaggggtgctgaaagtttttctggagaacgtgattcgcgacgcagtgacgtacactgagcacgcaaaacgtaaaaccgtgacggccatggacgtggtttacgctttaaaaagacagggtaggacactctacggtttcggcggatag

SEQ ID NO: 14963 - RNA, 2889 nt, synthetic construct
  misc_feature 1..2889: note = source = /note="Description of Artificial Sequence: Synthetic coding sequence"
  source 1..2889: mol_type = other RNA
atgttgcgaagacctgcccccgctctcgcccctgccgcccgtttacttcttgccggcctgttgtgcggcggaggagtttgggccgcccgagtcaacaaacacaaaccatggctggagcccacctaccacggtatcgtcaccgagaatgacaataccgtgctgctcgatccccctttgattgccctggacaaggatgccccgctcagatttgccgagagttttgaagtcacagtgaccaaggaaggtgaaatctgcgggtttaaaatacacggacaaaatgtgccttttgacgctgtggtagtggataagagcaccggagagggtgtcattagatccaaggagaagttggactgcgaactgcagaaggactacagcttcactatacaagcctacgactgcgggaagggcccagacggtaccaatgtaaagaagtcccataaagccacagtccacattcaggtaaatgacgtaaacgaatatgcccctgtttttaaggagaaatcatacaaagctacagttatcgaaggaaagcaatacgattcaatcctgcgggtggaagccgtcgacgccgattgttcaccacagttttctcagatttgttcttacgaaatcatcacccccgacgtcccctttaccgtcgacaaagatggatacattaaaaacaccgaaaaattgaactatggtaaagaacatcagtacaaattaacagtaactgcttatgattgtggtaagaagcgcgctaccgaagacgtcctggtcaaaatctctatcaagcccacttgcacgcctggatggcagggctggaataatcgcatcgagtatgagcccggcaccggcgccttggccgtgtttcctaacattcacctcgaaacatgtgatgaacctgtggcctctgtgcaggcgaccgtggaattggagacctcccacattggaaagggctgcgaccgggatacctatagtgaaaaaagccttcacagactttgtggcgctgccgccggcactgccgagctcttgccttcccccagtggttccctgaattggacaatgggcctgcccacggataatggacacgattcggatcaggtgttcgagtttaacggcacccaggcagtaagaatccccgatggagtagtcagtgtttccccaaaagaacctttcacaatttccgtttggatgcgtcacgggccgttcgggcgcaaaaaggaaaccatcctgtgcagcagtgataagaccgacatgaataggcatcattactcactttacgtccacggctgccgactcatttttttatttcgacaggacccttctgaggaaaagaaatacagacccgccgagtttcactggaagctgaaccaggtctgcgacgaagaatggcaccactacgtcttgaatgttgaattcccatccgtcaccttatacgttgacggtacttctcatgagcccttttccgttaccgaggactatcccctgcaccctagcaagatcgaaacgcagttagtggttggggcatgctggcagggaggtgacttacacatgacacaattcttccgggggaatctggcgggcctgaccctgaggagtggcaaactagcagacaagaaggtcatcgattgcctctatacttgtaaagaaggcctagatcttcaagtgcttgaagattcaggaaggggtgtgcagattcaggcccacccatctcaacttgtcttgactctcgagggggaagatttgggtgaattggacaaagcaatgcaacacatctcgtatttgaacagcagacaatttcctacaccaggaattcggcggttgaagattacctccacaattaagtgctttaacgaagctacatgcattagtgtgcctcccgtcgatggctatgtgatggtgttgcagccggaggagccaaaaatctctcttagtggagtccaccactttgccagagccgcgtctgagttcgaatcgtctgaaggcgtgtttttgttcccagaactgcgtatcatcagcacaataacccgcgaggttgaaccagagggggacggggccgaagatcctacagtccaagaatccctagtgtcagaagaaatcgttcatgatctggatacatgcgaagttaccgtggaaggcgaagaactcaatcatgaacaagagagtcttgaggtagatatggcgagactacaacaaaagggtatagaagtcagttcctccgaattgggcatgacattcacaggggtcgacacaatggcttcatacgaggaagtcttacatctgctgcggtatagaaactggcatgctagaagcctgctcgaccgaaaattcaagcttatctgtagcgaactcaatggccggtacatatcaaacgaattcaaggttgaggttaatgtcatacatactgctaatcccatggagcatgccaaccacatggccgctcagcctcagttcgtccacccggaacatagatccttcgtcgacctgtctgggcacaacttagccaacccgcacccatttgcagtcgtcccttctacagcaactgttgtcatagtggtatgtgtgagctttttggtatttatgattatactcggagtctttcggattagagccgcccacaggcgcacgatgcgcgatcaggatacaggaaaggaaaatgagatggactgggacgattcagccctgacgatcacagttaaccctatggagacttatgaggatcagcatagcagcgaggaagaagaagaggaggaagaagaagaggaaagtgaggacggagaggaggaggacgatatcacctctgctgagagtgagtctagcgaggaagaagagggggagcaaggtgacccacagaatgccacaagacaacaacaactggaatgggatgatagcacattatcatactag

SEQ ID NO: 14964 - RNA, 912 nt, synthetic construct
  misc_feature 1..912: note = source = /note="Description of Artificial Sequence: Synthetic coding sequence"
  source 1..912: mol_type = other RNA
atgttgcaccccgaaacctcccctggtcgcggacatctactcgctgtgctgttggctctgctggggactgcctgggccgaagtgtggccaccccaactgcaggagcaggcaccaatggcgggcgccctaaatcgtaaagagtccttcctactactatccctccacaaccggctccgaagttgggttcagcctccagctgcagatatgagacgactcgactggagtgactcgctggctcagctggcgcaggctagggctgcattgtgtggcacgccaaccccgtctctcgctagcgggctgtggagaaccctgcaggtgggctggaacatgcaacttctgcccgcgggcttggtttcatttgtggaggtggtgagcctgtggttcgccgagggtcaacgatattcacatgctgcaggtgagtgcgcaagaaacgccacgtgtacccactatactcagctcgtctgggctacctcttctcaactgggttgtggacgacatctgtgttcagcgggccaagctgcgatcgaggcatttgtgtgtgcttattcccccagaggcaattgggaggttaatggaaagacaatagttccctacaagaagggagcatggtgcagcctgtgtactgcctccgtttctggatgctttaaggcgtgggatcatgcagggggcctgtgcgaagtcccaagaaatccatgccggatgagttgtcagaatcatggccgactgaacatttctacatgccattgccattgtccccctggctatacaggacggtattgccaagtacgttgtagtctgcagtgcgtgcacggacggttcagggaagaagagtgttcctgcgtgtgcgacatcggctacggtgaaccttcagtgccacctcgatgcatattcccttccaccccagtgacttag

SEQ ID NO: 14965 - RNA, 1356 nt, synthetic construct
  misc_feature 1..1356: note = source = /note="Description of Artificial Sequence: Synthetic coding sequence"
  source 1..1356: mol_type = other RNA
atggaagctactggcactgacgaggttgacaagcttaagaccaaatttatttccgcatggaataatatgaaatacagctgggtgctcaaaacaaagacctacttctcaagaaactccccagtgctgttactaggaaaatgttaccattttaaatatgaagatgaagataagacacttccagccgaaagtggctgcaccatagaagatcacgttatagctgggaatgtggaagagttcagaaaggattttatttccaggatttggttgacctacagggaggagtttccacaaatcgaaggctcagccctgactactgactgtggctggggctgcaccctcagaaccggacagatgctgctcgcgcaaggtcttatccttcacttcctgggcagggcatggacatggccagacgccctcaatattgaaaacagcgactccgaatcttggacatcacacaccgtcaagaagttcacagcaagttttgaggctagcttgtcaggggagagagaatttaaaactccaacaatatccctgaaagaaacgatcggcaagtacagtgacgatcacgaaatgcgaaatgaggtttatcatcggaaaattatctcatggtttggcgactccccacttgcgctgttcggactgcaccaattaattgaatatggaaaaaagagcggcaagaaggccggtgactggtatggccctgcggtggtcgcccacatcctcagaaaagccgtcgaagaagctagacaccccgatttacagggaattaccatctatgtcgcccaggactgtaccgtgtacaattctgacgttatcgacaaacagtccgcaagcatgactagtgacaacgccgacgacaaggccgttattatcctggtgcctgtacgcctgggaggtgagaggacaaacactgattacctggaattcgtgaaagggattttgagtttggaatattgtgttggcataattggcggcaaaccaaaacaaagctactactttgccggttttcaagacgactccttgatatacatggatccccactattgtcagagttttgtcgacgtttccatcaaagacttccctctggagaccttccactgtccttccccaaaaaagatgagcttccggaaaatggatccaagttgtaccatcgggttttactgtagaaatgttcaagacttcaaacgagctagcgaggaaattactaaaatgctcaagttcagttctaaagaaaaatatccgctgttcaccttcgtcaacgggcactcacgggactacgacttcacaagtacaactaccaacgaggaagacttattttccgaagacgaaaaaaagcagaaaaaaaaaaaaaaatag

SEQ ID NO: 14966 - RNA, 1557 nt, synthetic construct
  misc_feature 1..1557: note = source = /note="Description of Artificial Sequence: Synthetic coding sequence"
  source 1..1557: mol_type = other RNA
atgagaacctgggactacagatggtctttagctctggtggcacagacaggcgtgcattgttgcaatctctctagcttgcagccccttcctccccggtttaagcgcttcagttgtctctctctttccagtggctgggactactccaattcagggaacatgaaaccaccccttttagtattcattgtatgcttgctctggctgaaagatagccactgcgccccgacatggaaggataaaacagcaatttcagagaacctcaagtctttcagtgaagtgggagagatcgacgcagacgaagaggttaagaaggccctgacagggatcaagcagatgaaaatcatgatggaacgaaaagaaaaagaacacacaaatttgatgagcaccctaaaaaaatgcagagaggagaaacaagaggccttaaaactgctcaacgaggtacaggagcatttggaagaagaggagagactttgcagagaatctctggccgactcctggggagaatgtaggtcctgtttagagaataactgtatgcgaatatacaccacatgccagccttcttggtcaagcgtcaagaacaagattgagcggttcttccgaaagatttatcagtttctctttccttttcacgaagacaacgaaaaagacctgcccatttcagagaaattaattgaagaagacgcccagctaacacaaatggaagacgtgttctcccaactgacagtagatgtgaactcactgttcaatagatcttttaatgtatttaggcagatgcagcaagaattcgatcagacttttcagtcacatttcattagtgacaccgacctcacagagccctacttctttccagcctttagcaaagaacccatgaccaaagccgacctcgagcagtgctgggacatcccaaactttttccaacttttctgcaatttttccgtttctatttatgaatctgtctccgaaactatcactaagatgctgaaagccatcgaggatctccctaagcaagacaaagcacccgaccatggcgggttaatatccaaaatgctgcccggacaggataggggactgtgcggagagttagaccagaacttatccagatgctttaaattccacgagaagtgtcagaaatgccaggcccacctctcagaggattgtcccgatgtgcccgcacttcatactgagttggacgaagcgatcaggttggtcaatgtgtcgaaccagcaatatggccagattctgcaaatgacccgcaagcacttagaggataccgcatatttagtagagaagatgcggggccaattcggatgggtatctgagctcgctaaccaagcacccgaaactgagattattttcaatagcatccaggtggtgccacgaatccacgaaggcaatattagtaagcaggacgaaaccatgatgactgatctctctatactgccctcctcaaattttacattgaaaattcccttagaggaatcagccgagtcatccaacttcattggctacgtcgtcgcaaaagcccttcagcacttcaaagagcatttcaaaacctggtag

SEQ ID NO: 14967 - RNA, 1716 nt, synthetic construct
  misc_feature 1..1716: note = source = /note="Description of Artificial Sequence: Synthetic coding sequence"
  source 1..1716: mol_type = other RNA
gttgagatgagaaagtggagctccgaaccaggacctgaaccggacacagtagaagccgttatcgagtatatgtataccggccggatccgggtgtccaccggttcagtgcacgaagttctcgaactggccgatcgcttcctcctgattaggctaaaggagttctgcggagagtttttaaaaaaaaaactgcatctgagtaattgcgttgctattcattcattagcccacatgtacaccctgtcacagctagcactcaaggcagccgatatgattcgccggaatttccataaagtcattcaagatgaagaattctacacactcccttttcacctcattagggactggcttagcgatctggagattactgtggattccgaggaggtgttatttgagacagtgctgaaatgggtccagagaaacgctgaggaaagagaaaggtatttcgaggaactctttaaacttctgagactgtcccaaatgaaacccacctatctgacgcggcatgttaaacccgagcgactggtggctaataatgaagtctgcgttaaactcgtggccgatgccgtggagcgacatgccttacgggccgagaatatccagtcaggaacctgccaacaccctacatcacatgtgtccctactcccaagatatgggcagaacatggatgtgattatggtgatcgggggcgtaagtgaagggggcgactacttgagcgaatgcgtcggttacttcgtcgacgaggaccgatgggtcaacctgccacacatccataatcatctggacgggcatgccgttgctgtcactgaatcctatgtatatgttgcaggcagcatggagccaggatttgcaaaaactgtagagaggtataaccccaatctaaatacctgggaacacgtttgctctctgatgacccgtaagcattctttcggtcttactgaagtaaaaggtaaactgtattcgattggcggacacggcaacttttctcccggctttaaagatgttaccgtctacaatccagagctcgataagtggcacaatctggagtctgcacccaagattctgcgagatgtaaaagccctcgcgattgaagatcgctttgtttatattgctgcacgaacaccagtggatcgagatactgaagatggtctgaaagcagtgatcacatgctacgacaccgagacacgacagtggcaggatgtggagtcccttccccttatcgacaattactgtttctttcagatgtccgtggtcaatagcaatttttaccagactgctagctgttgccctaaatcatattgcctagagaatgaggaagcggtccgcaaaatcgcctcgcaagtgtctgacgagatcctggaaagtttgcctccagaagtcctgagtattgaaggagccgcaatttgctactataaagacgacgtttttatcatcggagggtggaaaaattccgacgacatagataaacagtacagaaaagaagcctacagatattgcgctgagcggaaaagatggatgctgttacctccaatgccgcagccccggtgtagagccaccgcttgccacgtccgaataccctaccgttacctccatggaacacaaagatatcctatgcctcaaaacctcatgtggcagaaagacaggatccggcagatgcaggaaattcacaggcacgccctcaacatgcgacgcgttccatccagtcagatagagtgttag

SEQ ID NO: 14968 - RNA, 729 nt, synthetic construct
  misc_feature 1..729: note = source = /note="Description of Artificial Sequence: Synthetic coding sequence"
  source 1..729: mol_type = other RNA
atgttaaaaaagatctctgtcggagtggccggagacctcaacactgtgaccatgaaactgggatgcgtacttatggcttgggctctctatctcagtctgggagtcctgtgggtcgcccaaatgctcctggccgccgggtgtcacgcagagctgtttcctgcgcctattctgagggcagtccctagcgcagaacctcaggctggatcacccatgaccttgagctgtcagaccaaattgcctttgcagcggtccgccgcacggctcttattcagtttttataaggatggaagaattgtgcagtcaagagggctgtcctcagaattccagattcccacagcctccgaggaccacagtggaagttactggtgcgaagcagcgacagaagataatcaggtctggaagcagtcaccgcagcttgagattcgtgtgcagggagcaagtagctcagcggcaccaccaacattgaacccagccccacagaagtcagccgcccccggaactgcacccgaagaagcacccggccctctcccccctccccccaccccaagttccgaagatcctggattcagtagcccacttgggatgcccgacccacacctgtaccaccaaatgggtctccttctgaaacacatgcaggatgtgcgagtgcttttaggacatcttctcatggaacttagagaactctccggccaccggaaaccgggaacgaccaaggcaaccgcagagtag

SEQ ID NO: 14969 - RNA, 1392 nt, synthetic construct
  misc_feature 1..1392: note = source = /note="Description of Artificial Sequence: Synthetic coding sequence"
  source 1..1392: mol_type = other RNA
atgtatgtgtcgaccagggagagatacaagtggctgagatttagtgaggattgtttgtacctgaatgtgtacgcacctgccagagcaccaggcgatccccagttacctgttatggtgtggttccccggaggcgcttttatagtgggggctgctagttcttacgagggctctgacctagcagcaagagaaaaagttgttctggtgttcctccaacacagactgggaatttttggctttctcagcaccgatgactctcatgcaagaggcaactggggcctgctggaccagatggctgccctgcggtgggtgcaggagaatatcgccgcatttggaggtgatccagggaacgtgacactgtttggccagtccgcaggtgctatgtcaatttcaggacttatgatgagcccgcttgcatctgggctgttccatcgtgcgatctcccaatcaggaaccgcattattcaggctctttataaccagtaacccgctaaaagtggcaaagaaagtcgcgcacctggctggatgcaatcataattctacacagatcctagtcaactgtttgcgcgctctgtctgggaccaaggttatgagggtgagcaacaagatgcgattcttacaattgaactttcagcgcgatcctgaggaaatcatctggtccatgtctccagtcgttgacggcgtggtgatccccgatgatccgcttgtgctactgacacagggtaaagtctctagtgtcccctacttgctgggggttaacaacctggaatttaattggctcctcccatacataatgaaattccctctaaatcgacaggctatgagaaaagaaactatcacaaaaatgctgtggtccacccgcacactactgaacataacaaaggaacaagtgcctctggtggtggaagaatacctggacaatgtgaacgaacacgattggaagatgctccgcaatcgaatgatggatattgttcaagacgctacttttgtctacgccaccctgcaaacagctcactaccatcgtgatgccggcctcccagtttatctgtatgaatttgagcaccacgcccgtggaataattgtgaagccccggaccgacggtgccgaccacggagatgaaatgtacttccttttcggaggcccttttgccactggtctgtcgatgggcaaagagaaggccctctccctacagatgatgaaatactgggctaactttgcacgcaccggaaatccaaacgacggtaatctcccatgttggccaaggtataacaaagatgaaaagtatctgcagctcgatttcacaacacgcgtgggaatgaagttgaaagaaaagaaaatggccttttggatgtccctataccagtcccaaagacccgagaagcagcgacagttttag

SEQ ID NO: 14970 - RNA, 1215 nt, synthetic construct
  misc_feature 1..1215: note = source = /note="Description of Artificial Sequence: Synthetic coding sequence"
  source 1..1215: mol_type = other RNA
atgttttatcatgcatacgattcttatttggaaaatgcttttccctttgatgaactgaggccattgacctgtgacggccacgacacctggggcagcttttcactcacactcatcgatgcacttgataccctgctcattctgggtaatgtctctgaattccagcgcgtggttgaggtattgcaggattccgtggactttgacattgacgtcaacgcttctgtatttgaaaccaacatccgagtcgtcgggggtctgttaagcgctcatctcttaagcaagaaggctggggtggaggtggaagccggatggccctgcagcggacccctcttaagaatggcagaagaagccgcgcgaaagctcttgcctgcgtttcaaactcctacgggaatgccttacggcactgtgaacctgcttcacggcgttaatcctggcgagactcccgtaacttgtactgccggcatcgggaccttcattgttgagtttgctaccctatcttcactcacaggggatccagtctttgaagatgtggccagagttgccctcatgcgcctgtgggaaagccggagtgatatcgggttggtgggaaatcatatagacgtgctgactggcaaatgggtcgcacaggatgcaggtatcggggccggagtcgacagctacttcgagtatctggttaaaggcgctattttgctgcaggataaaaagctgatggccatgttcctggaatataataaggctattagaaactatacccgattcgatgactggtacctttgggtgcagatgtacaaaggaactgtgagcatgcccgtattccaatcccttgaggcttactggccaggcttgcaatcattgattggcgacattgataatgcaatgcggaccttcctaaattactatactgtgtggaagcaattcggtgggctgcccgaattttacaacattcctcagggttatacggttgaaaaaagggagggctatccactgcgcccggaattaattgaatcagccatgtacctgtatcgcgctaccggagaccccaccctgctggaacttggacgtgacgccgtcgaaagtatcgaaaaaataagcaaagtggaatgtggtttcgccaccgtgtctgtctgtatggccccaaggacagggaagtccctaccattgctgttaaaatcgcttttcaagggtcgagctttaggtgttctgacctaccaacactag

SEQ ID NO: 14971 - RNA, 1281 nt, synthetic construct
  misc_feature 1..1281: note = source = /note="Description of Artificial Sequence: Synthetic coding sequence"
  source 1..1281: mol_type = other RNA
atgggatggaccgacacacttgaatctgcggaagacatattttggaaacaggcagattttggctatgcaagggaacgtctcgaagaaatgcatgtactctgtcagccaaaagagacctcagacagcagcttagtctgtagtcggtaccttcagtactgtcgagcaacaaacctctatcttgatctgagaaacattaaacgaaatcacgatcgctttaaagaggactttttccagagcggcgaaatcggaggccactgtaaactcgacattaggacattgacgtcagaaggccagaggaagtctcctttgcagagctggtttgctgaattgcaatcttatactcagttgaacttcagacctatcgaagacgccaaatgcgatatagtcatcgagaagccaacatactttatgaaactggatgctggcgtaaacatgtaccatcatttctgcgattttattaacctctacatcacccagcacgtgaataactcatttagtacagatgtttacattgtcatgtgggacactagctcgtacggatacggagacctgttcagcgatacatggaatgccttcaccgattacgacgttattcatctgaaaacctatgatagtaaaagagtttgctttaaggaagctgtgttctccctcttgcctaggatgcggtacggtctcttttataatacccctctgataagcggctgtcaaaatactggactctttcgggccttcgcccagcatgtgttgcatcgactcaacattacgcaggaaggaccaaaagacggcaagatacgcgtgaccatactggcccgttctactgaatatcgcaaaatcctcaatcagaatgagctggtgaacgccctgaaaaccgtatcaacatttgaagtgcagattgtcgactacaagtaccgtgaactgggctttctcgaccagctgcggatcacccacaatacagacatcttcattggaatgcacggagcaggactcacccatctcctctttctgcctgactgggccgccgtgtttgaactctataattgcgaggacgagcgctgctacctcgacctggccaggctccgcggagtgcactatattacgtggaggaggcaaaataaagtcttccctcaagacaaaggacaccatcctaccttaggcgaacacccaaaatttacaaactactcttttgatgttgaagaattcatgtatttagtactgcaggccgccgaccacgttttacaacaccctaaatggccctttaaaaagaaacacgatgagctgtag

SEQ ID NO: 14972 - RNA, 1098 nt, synthetic construct
  misc_feature 1..1098: note = source = /note="Description of Artificial Sequence: Synthetic coding sequence"
  source 1..1098: mol_type = other RNA
atgaaactgggatgcgtgttaatggcatgggcactctacctgtccttgggcgttctctgggtggcacagatgctgcttgtggcctctagttttagtgcagcctcttttgagaccctccagtgtgaaggccccgtgtgtactgaggagtctagttgtcacaccgaggatgatctgactgatgctagagaagcaggatttcaggtgaaggcttatacattctcagaacctttccatttgatagtctcttacgattggttgatattgcaaggccctgcgaagccagtttttgagggggacctgttagtcctcagatgccaggcgtggcaagactggccactcacacaagtcacgttctacagggatggatccgcactggggcccccaggtcccaatagggaatttagcataacagtcgttcagaaagcggactctggacactatcactgtagcggtatctttcagtcgccaggccccggtattcccgaaactgcttcagtggttgcgattacagttcaggagttgttccccgctcctattctgcgtgcagttccatcagctgagccccaagctggcagccctatgaccctcagctgtcaaactaaactgcccttgcagagatccgccgctcgccttctgtttagcttctacaaagatggcaggatcgtacagtcaagaggattgagcagtgaatttcagattcccactgcgtccgaagatcacagcggctcctactggtgcgaagccgctaccgaggacaaccaagtttggaaacagtccccccaactggaaatcagggtccagggtgcctcgtcatctgccgctcctcctacgttgaacccagcccctcagaagtctgccgcccccggtacagcgcccgaagaggctccgggtccccttcctccgccgcctacaccatcctctgaggaccctggatttagttcccctctgggaatgccagacccccacttgtatcaccaaatgggattgctactgaagcatatgcaggacgttagagtgcttttaggtcaccttttaatggagttacgcgaactgtcaggccaccgtaaacccggtactaccaaggcaactgctgagtag

SEQ ID NO: 14973 - RNA, 1407 nt, synthetic construct
  misc_feature 1..1407: note = source = /note="Description of Artificial Sequence: Synthetic coding sequence"
  source 1..1407: mol_type = other RNA
atgcgctggatactctgctggagccttactttgtgtctgatggcgcagactgccctgggggcccttcacaccaaacgtccacaggtcgtgaccaaatatggaaccctgcaaggaaaacagatgcacgtcgggaaaacacctatacaagtatttcttggtgtaccctttagccgacctcctctgggaattctcagatttgcaccacccgaaccccccgaaccctggaagggaatcagagacgccacgacctacccccccggatgtctgcaagagagttgggggcagctggcctctatgtacgtgtcaacaagagagcgctataaatggttacggttttccgaggactgcttgtacctgaatgtgtacgcacccgcccgggcgcccggtgatccacaactgcccgttatggtgtggttccccggaggggcctttatcgtaggcgccgcatctagctatgaagggagcgatctggccgctagagaaaaagttgtgctagtttttctgcagcaccgattgggaatattcgggtttctgtccacagacgattctcacgccagaggaaactggggcttgttagaccagatggctgccttaaggtgggttcaagagaatatcgccgcttttggcggagatcctggcaacgtaaccctgtttgggcagtctgctggagccatgtccatttcaggccttatgatgtctccacttgcttctggcctgttccacagagccatatctcagtctggaacagcactctttcggctcttcatcacaagcaatcccctcaaggtcgcaaaaaaggtggcccatctggcagggtgtaaccacaactccacacaaatattggtcaattgtcttcgagctctgagcgggactaaggttatgcgcgtgtctaataagatgagatttctgcagctgaactttcagcgggatcccgaagagataatttggtccatgtctcctgtggtagatggggtcgtgatcccagacgacccactcgtgctgctgacccagggcaaggtgagctccgtcccctaccttctcggcgtgaacaacttagaatttaactggctccttccctatatcatgaaattccctttgaacagacaggccatgcgcaaggaaaccatcactaagatgctctggtccacaaggaccctgcttaacattacaaaggaacaagtccccctggtggtcgaagagtacctcgacaatgttaatgaacatgactggaagatgctgcgtaaccgtatgatggacatagttcaggatgcaaccttcgtatatgccactttacagacagcacattaccacagagagacaccaatgatgggcatctgcccagccggacacgccacaacaaggatgaagagcacctgttcatggattctcccgcaggagtgggcatag

SEQ ID NO: 14974 - RNA, 756 nt, synthetic construct
  misc_feature 1..756: note = source = /note="Description of Artificial Sequence: Synthetic coding sequence"
  source 1..756: mol_type = other RNA
atgtcttcttacggctacggagatcttttcagtgatacctggaatgcatttacagactatgatgtaatacacttgaaaacttacgattccaagcgggtctgctttaaagaagccgtgttctcattgctgccccgaatgcgctatgggctcttttataatacaccccttatttccggctgccaaaatactggattgttccgagcctttgcacagcacgtccttcaccgacttaacataacacaggaaggtccaaaggatggaaaaattagggttacaattttggctcgaagtaccgaatatcgtaaaatactcaatcaaaatgaactggtaaatgcactaaagaccgtgtccacatttgaggtgcagatcgtcgattataaatatagagagcttgggttcctggatcagctacgaatcacacacaatacagatatctttatcgggatgcacggcgcaggtctcacacacctgttgtttctgcccgattgggccgcagtctttgaattgtacaactgcgaagacgaaagatgttatctcgaccttgcccggctgcgtggagtacactacattacatggagaaggcagaacaaggtatttccacaggacaaagggcaccatccgacccttggcgagcatcccaaattcactaactattcgttcgatgtagaggaattcatgtacctggtcctgcaagccgccgaccatgtattacaacatcccaaatggccattcaagaaaaaacatgacgaattatag

SEQ ID NO: 14975 - RNA, 927 nt, synthetic construct
  misc_feature 1..927: note = source = /note="Description of Artificial Sequence: Synthetic coding sequence"
  source 1..927: mol_type = other RNA
atgatccccgttgaactgctcctttgctatcttttgctgcatcctgtggatgccaccagctacggaaaacagacaaatgtacttatgcattttcccctttctctggagagtcagactccctcctccgatcccctaagttgccaattcctccatcccaagtcattaccaggcttctctcacatggccccacttccaaaatttcttgtgtctttggccctacgaaatgctctagaggaggcgggttgccaggcagacgtttgggccctgcagttgcaactataccgtcagggcggtgtgaacgcgacccaggtgttaattcaacacttaaggggcctccagaaaggacgaagtacagagcgcaatgtttcagtagaagcgctggcttcagcactgcaattgctcgcccgagaacagcaaagcacagggagagtgggaagatcccttcctacagaggattgtgagaatgagaaagaacaggcagtgcataacgtggttcagttattgccgggcgtcggtaccttctacaatctagggactgccctgtattatgccacccagaactgcctggggaaagctagagaacgcggaagagacggtgcaattgacttaggctatgacctgctgatgacgatggccggtatgagcgggggcccaatgggcttggccattagcgccgcccttaagcctgcattacggtcaggcgtccagcagcttattcagtactatcaggaccagaaggacgcaaacattagccaacctgaaaccaccaaagaagggctcagagccattagcgacgtgtcagatcttgaagagaccacaaccttagctagctttatctctgaggtcgtgtcgagcgcaccatattggggatgggccatcataaagagttacgatctcgaccccggcgcaggttcactcgagatttag

SEQ ID NO: 14976 - RNA, 2862 nt, synthetic construct
  misc_feature 1..2862: note = source = /note="Description of Artificial Sequence: Synthetic coding sequence"
  source 1..2862: mol_type = other RNA
atgcgcgtcctagcctgcttgttggccgcattagtaggaattcaggcagtagagcggttaagactggccgacggtccgcacggatgtgccgggcgcttagaggtgtggcatggggggaggtggggaaccgtgtgtgatgatggctgggatctgagagacgctgcagtggcgtgcaggcagctggggtgtggcggagctttggccgcacccggaggggcattcttcggcgaaggagctgggcctgtgtggctgtccgaactggcctgtcgcggcaacgagggacagctgggcctgtgtcaccatagaggatggaaagcccacatttgtagccatgaagaggatgcaggtgtggtgtgtgctggccagagagtcgcaaactctagagatgattcaacctcgccgttagacggagcaccatggccagggctgctcctggaactctcgccttctaccgaggagcccctagttacacatgcccccagacccgctgggaatccacagaacgcaagccggaagaagtcaccacgtcctaaacaggcaaaatcaacccgcgcccctttgctgaccaccggcgccccgagacaggaacggttgcggttagtatctgggccgcacaggtgtgccggtagactcgaagtgtggcacggcgggaggtggggaactgtgtgtgacgatggttgggatttaagagacgctgcggtagcgtgccgcgaactaggatgtggcggagccttggctgcgcccgggggcgccaggtttggaccaggggccgggccggtgtggatggacgatgtggggtgtgggggcggagagcaggcactgcgtgattgtcccaggtctccctgggggaggtccaactgtgaccattcggaagacgccgggctggtttgtaccgggccggcgcctagattaaggctagccgacggtccacatgggtgcgcagggagactggaagtgtggcacggtggaagatgggggagcgtgtgcgacgacgcctgggacctaagagacgcggcagtggcctgcagagaactcggatgcggcggcgctctcgccgctccagggggggcttttttcggggagggcagtgggcctatcatattggacgatctgcgatgccgtgggaacgagaccgctctaaggttttgtccggcccgaccttggggccagcatgactgccaccatagggaggatgcaggtgccgtatgcgacggaatgcccctcggttacgtgccccccactgcgcccacagattctaataattccacaccaagggaagccgcctcacgcccaccttccactatgacatcacaagccccaggaacagcaggagtcagtccaccacccgcctcgccaaccgtcctgtgggagccaggaccggaggccggaagccctcaattgaggttggtcgctggcccgagtaaatgctccggcagacttgaagtctggcatgatcaaagatggggtaccgtgtgcgatgactcttgggatatgagagattcagcagttgtctgccgcgaactcggctgcgggggcccgcaacagcccgatccagccgccggacgatttggctggggtgccggacctatatggttggatgacgtcggctgcgtcggcacggaggctagccttagtgattgccctgctgcaccctggggcaaacataattgtgcacacaatgaggacgtgggggttacatgcacaggcccgcccggtcttgatagcatttccgatccattcagttggtcctggataccaggcctgggcagagatagggacgcctggctacctggcgagttggcgaccaagccttctgctagtgtaacagcctcagtccttgaaaaaactacgacgaaagcacctggaaaaatgcctaaaagtactaaaaagtgggttacaaaaaacgccaaacgaccaaccactcaaccccccgtgatgcctacaaccaagcacagccgggcccagtctccgccagacctcacatcccagacaacggcagctttaaccaccgaggcgtccagacgaccaaccagcgagtttacccggcgccctaccaccgaagccccccagcggtggacttctcacactactgcgaccctaacgccccaggctcctagagagagaactacaaaaactatggcaatgctaacgacccaaggaccacaggaaatgacgagcgaatcaacaatcaaatccataccacaggcctccttagagccatccgcagaaatcccagaaggaagcccggaatctcccaaggatcccgccccctccccaagcgtgtctactacgggggaaagcgggctgtttagagtgagactggccgacggccccaatcgctgcgctggcaggttggaggtatggcacgccggaaggtggggaacagtgtgcgacgataactgggatttacgggacgcaacagtcgcctgttgggagctggggtgcggaaaagtgcggcctcgtgttggaaaaacacactacggcccaggtacaggcccgatttggcttgatgacatgggatgcaagggctctgaagcaagtctgagcgattgcccatcgggtgcttggggaaaacacaattgtgatcacgaagaagacgtagggctgacctgcacagggtacactgattatgatgattaccctccatggacctgggaccctactagcagagaagatctagccaaaggaacaaccaccgctggagtcccagggcatacactaccctggaggaccacacgtcggcccggaagctctagccccgctataagaagactgccagatactgaaccggaagctggcctgcgcgaagttatgcttttggtgcaaggacttcccggcctgcaaagattaccatcaccgtag

SEQ ID NO: 14977 - RNA, 474 nt, synthetic construct
  misc_feature 1..474: note = source = /note="Description of Artificial Sequence: Synthetic coding sequence"
  source 1..474: mol_type = other RNA
atgcttagaaccgagtcctgtcggcccagatctccagcggggcaggtcgcagctgcctcaccattactgctactgctgttactcctggcctggtgtgcgggcgcatgtagaggagctcccatcctacctcaaggccttcaacccgagcagcaacttcaactgtggaacgagatcgacgatacatgctcctcattcctctccattgacagccaaccacaggcctcaaacgctctggaagaactgtgtttcatgatcatgggcatgctgccaaaaccacaggagcaggatgagaaagacaacacaaaaaggtcctcggtcgtccatcccttgctccaactggtccctcacttacacgaaagaaggatgaaacgattcagggtagacgaggagttccaatctccatttgcatctcaatcccgaggctatttcctgtttaggccccgtaatggaaggagaagtgcagggttcatttag

SEQ ID NO: 14978 - RNA, 1545 nt, synthetic construct
  misc_feature 1..1545: note = source = /note="Description of Artificial Sequence: Synthetic coding sequence"
  source 1..1545: mol_type = other RNA
atgccttcaactgtcctgcccagcactgtgcttccttccctgttacctaccgcgggtgccggatggagcatgcggtggatcctctgttggtctcttacattatgtcttatggcgcagactgcactgggagccctgcacactaaacgaccccaagttgtcacaaaatatggaaccttgcaggggaaacagatgcatgtgggaaagacacccatccaggtattccttggtgtgccattctctagaccccccctgggtattctgagattcgcccccccggagccacctgagccgtggaaaggaatcagggatgctacaacttatcccccagggtgtctccaagaaagttggggacaactggcctcaatgtacgtgtccactagagagcggtataaatggttgcgttttagcgaagattgtttgtatcttaacgtctacgcccccgcccgcgctcctggggatcctcagctgccagtgatggtgtggtttccaggtggagcatttattgtcggggctgccagcagttatgaagggagcgacttggccgcgcgagaaaaagtggtcttagttttcttgcaacacagactcggtattttcggattcttaagtactgatgacagtcacgcgcgcggtaactggggtctcctcgaccagatggcagctttacggtgggttcaggaaaatatagcagctttcggcggggatcctggtaacgtcactctctttggtcagtctgccggagcaatgtctatcagcggcctgatgatgtcccccctggcctccggtttgttccacagagccatttcacaaagcgggaccgcccttttccgcttgtttatcaccagtaatccactaaaggtcgctaagaaggtagcacatctcgccggatgcaaccataatagtactcagatcctggtaaactgtctgagagctctgtctggaacaaaggtgatgcgagtgtcaaataagatgcggtttttacagctgaattttcagcgtgaccctgaagagattatctggagcatgtcccctgtggttgatggcgtggtgattcctgatgacccactggtgctgctgacccagggcaaggtctcttccgtcccttatctgctaggagtcaataatctcgagtttaactggttgctgccctacaacatcaccaaagagcaggtaccgctggttgtagaagaatatcttgataacgtcaatgagcacgattggaagatgctgagaaatcgaatgatggatatagtacaagacgcgacatttgtatatgccacgctacagacggcccattaccacagaggactatcaatgggaaaagagaaagctcttagcctccaaatgatgaagtactgggctaactttgcccgcacagggaatccgaacgacgggaatttaccttgctggccaagatataacaaggatgaaaagtaccttcagctcgattttacaacacgggtaggtatgaagttgaaagagaagaagatggctttttggatgtctctataccagtcacaaaggccagaaaagcaacgccagttctag

SEQ ID NO: 14979 - RNA, 1062 nt, synthetic construct
  misc_feature 1..1062: note = source = /note="Description of Artificial Sequence: Synthetic coding sequence"
  source 1..1062: mol_type = other RNA
atgtctaacccgacccagaccgacgccgattccgacttagttggcgacgtatgcgatacaaacgaagattccgacggcgatggccaccaagacacaaaggataattgcccccagttaccaaactctagtcagctggattccgacaacgacgggctaggcgacgaatgtgatggagatgatgacaatgatgggattccagactacgtccctcctggacccgataactgtagacttgtgccgaatccaaaccaaaaggatagcgacgggaatggagtaggagacgtgtgcgaagatgacttcgataacgacgccgttgttgaccccttagatgtgtgtcctgaatcagcagaagttaccttaaccgacttcagagcctatcagactgtggtgttggacccggagggtgatgcccagatcgatcctaattgggtggtactaaaccaggggatggaaatagtgcaaaccatgaatagtgatcctggattggccgtgggctataccgcctttaatggagtggacttcgaaggaactttccatgtcaatactgtaacagacgacgactacgctggttttctattttcataccaggattctgggagattctacgtcgtaatgtggaaacagaccgaacaaacctattggcaggcaaccccctttcgcgccgtagcacagcctggcttgcaacttaaagcagtgacatccgtctccggtccgggcgagcatttgcgaaacgcactttggcacaccggacacactccagaccaggtccgcttgctatggactgaccccaggaacgtgggctggagagacaagacttcttatcgttggcaactgctgcacagaccacaagttgggtacatccgggtcaaattgtacgaaggccctcaactagttgccgatagcggagtgattatcgatacgagtatgcgcggaggtcggctgggggtattctgtttcagtcaggagaatattatctggtctaatttacagtacaggtgcaacgatacagttcctgaggattttgagccattccggagacaactcttgcagggaagggtatag

SEQ ID NO: 14980 - RNA, 1074 nt, synthetic construct
  misc_feature 1..1074: note = source = /note="Description of Artificial Sequence: Synthetic coding sequence"
  source 1..1074: mol_type = other RNA
atggagattgagcataccctcgatcagatgatctcaaaagtgggtaaccatatcgacgtgttaactggaaagtgggtggctcaggacgcaggaatcggtgccggtgtagattcctatttcgaatatttggtgaaaggagctatacttctccaggacaaaaagctcatggctatgtttctcgaatacaataaagccatacggaattatacacgcttcgacgactggtacttatgggtccagatgtacaaagggaccgttagcatgccagtgtttcagtcacttgaggcatactggcctggcttacagagcctcatcggagatatcgacaacgccatgcgaacctttctgaattactatactgtatggaagcaattcggcggactgcccgaattctataatatacctcagggctataccgtggaaaagcgggagggctatccacttcgtccggagctcattgagagtgccatgtatttgtacagagcgactggagatcctacattgctggagctggggcgagacgcggtcgaatctattgaaaagatatctaaagtggaatgtggatttgcaactattaaagatctaagggaccataaactggataacagaatggaatctttcttcctcgcagagaccgttaaatacctgtatctgctttttgatcctaccaactttattcacaacaatggaagcaccttcgatgcggtcattactccatacggcgaatgtattctgggcgctggtggctacatttttaacactgaggcgcaccctatcgatcctgctgcgttacactgctgtcaacgcctgaaggaggaacaatgggaagtagaggatcttatgcgagagttctacagcctgaaacggtcccgatctaaattccagaaaaacacggtcagctccggaccgtgggagcctcccgccagaccaggaaccttgttttcccccgaaaaccatgaccaggcacgtgagaggaagccagccaaacagaaggtccccctgttatcctgcccttcacaaccattcacgagtaagctggcactgctgggacaggtgttcttagattcatcatag

SEQ ID NO: 14981 - RNA, 1341 nt, synthetic construct
  misc_feature 1..1341: note = source = /note="Description of Artificial Sequence: Synthetic coding sequence"
  source 1..1341: mol_type = other RNA
atgttacaccctgagacttctcccggtcgcggacacctgctcgctgtgctgctggcattactgggcaccgcttgggccgaggtatggccacctcaactgcaggagcaagccccaatggccggcgccctgaaccgtaaagagtcattcctgctgcttagcctacacaaccgcctgcgaagctgggttcaacctcccgccgcagatatgcgcaggctggactggtcagactcactggctcaattggctcaggcacgagccgccttgtgcggcatacccaccccctccctcgcatctggcctctggcggactcttcaggtagggtggaacatgcaactccttcccgccggtcttgcctcatttgtagaggtagtctccttatggtttgcagagggtcaaagatatagtcatgccgcaggcgaatgtgccagaaacgctacctgcacgcactatacccaactcgtatgggctacttcttctcaactaggatgcggaagacacttgtgcagcgcagggcaagccgcgatcgaggcttttgtgtgcgcatactcaccccgggggaattgggaggtaaacggtaagaccatcgtcccctataaaaaaggggcctggtgttcattgtgtacagctagcgtttcaggttgttttaaagcatgggaccacgccggcggactctgtgaggtgccgagaaatccatgcagaatgtcatgccaaaaccatggccggcttaacatttccacatgtcattgtcactgtcccccaggatacaccggcagatactgtcaagtccggtgttcactacaatgcgtccacgggagattcagagaagaagagtgtagctgcgtgtgcgacattggttacggcggcgcacagtgtgccactaaggtgcacttcccttttcatacgtgcgacctaagaattgatggagattgttttatggtaagcagcgaagccgacacctactatagagctcggatgaagtgccaacgaaagggaggcgtacttgctcagatcaagtcgcagaaagttcaggacattctagccttctatctaggtcggctggaaactaccaatgaggtcatcgactccgattttgaaacacgaaatttttggataggattgacatataagacagcgaaggattccttcagatgggcaactggagagcatcaggctttcacctctttcgcattcgggcagccagataatcatggatttggaaactgtgttgagcttcaagcatcagcagcatttaattggaataatcagcggtgtaaaacccgaaaccgctatatctgtcagtttgctcaggagcatatatctagatgggggccaggtagttag

SEQ ID NO: 14982 - RNA, 900 nt, synthetic construct
  misc_feature 1..900: note = source = /note="Description of Artificial Sequence: Synthetic coding sequence"
  source 1..900: mol_type = other RNA
atgggcggaccacgagctctactggctgccctgtgggctttggaagccgcaggcacagcagctctcagaatcggcgcatttaatattcagtccttcggcgatagcaaagtgagcgatcctgcttgtgggagcatcatcgcaaaaatcctcgccggatatgatctcgcactcgtccaggaagtgcgggaccccgatttatcagcagtttctgctctgatggagcaaatcaacagtgttagcgagcatgagtactccttcgtaagcagtcagcctcttggtcgagatcagtataaagagatgtacctgtttgtgtatcgaaaggacgcggtatctgttgttgatacttacttgtaccctgacccagaagatgttttctctcgagagccatttgtggttaagtttagtgcaccaggcacaggagaacgggccccaccactgccgtctagaagggccctgactccccccccacttcctgccgctgcccaaaacctcgttttgattcccctgcatgccgcccctcaccaggccgtcgccgagattgacgccctgtacgatgtgtacctcgatgtcattgacaaatgggggactgatgatatgctgtttttaggcgacttcaacgcagactgctcctacgtgcgcgctcaagattgggcagcgatcagactacgcagctccgaagtgtttaaatggctgattcccgactcagctgacactacagtgggaaattcagattgcgcctacgaccgtattgtggcatgcggggctaggttgagaaggagtctcaaaccacagagtgcaacagtgcatgattttcaggaagagttcggtctggatcagacccaagcgcttgccatctctgaccactttccagttgaagtcacactcaaatttcataggtag

SEQ ID NO: 14983 - RNA, 1458 nt, synthetic construct
  misc_feature 1..1458: note = source = /note="Description of Artificial Sequence: Synthetic coding sequence"
  source 1..1458: mol_type = other RNA
atggacaacaataaacactgtaagcaggataattgtctgttaacgccgaatagcggccaggaggacgcagacaatgatggagtcggagatcaatgtgacgatgacgcagatggagacggaatcaagaatgtggaagataattgccggctctttcctaacaaggaccagcagaacagcgataccgatagtttcggcgatgcctgtgacaactgtcctaatgtgcccaacaatgaccaaaaagataccgacggcaacggtgaaggagatgcctgcgacaatgatgtggatggagatggaattcctaatggattggataactgtcccaaagttccaaacccactgcagaccgaccgagacgaggatggtgtaggggatgcttgtgactcctgtcccgagatgtcaaaccccacccagaccgacgccgattctgacttagtgggcgacgtatgtgatacgaacgaagatagcgatggagacggacaccaggacactaaagacaactgcccccagctgccaaactcctctcagcttgatagcgacaatgacggccttggagatgagtgtgatggcgacgatgacaatgatggaatccctgactacgtaccccccggccccgataactgccgcttggttccaaatcccaaccagaaagacagcgatggcaatggagtgggcgacgtatgtgaggacgactttgacaatgacgctgtggtggatccgctcgacgtttgtccggaaagcgccgaggtgacactaactgacttcagggcataccaaactgtggtgctcgacccagaaggcgacgcccagatcgatcccaactgggtggtcttgaaccagggcatggaaatagtgcagacaatgaacagtgatcctggcttagccgtcggttataccgctttcaatggagtggacttcgagggtacttttcacgttaacaccgtaacagacgacgattatgcaggttttctcttctcttatcaggactcagggagattttatgttgtgatgtggaagcagaccgaacagacatattggcaggcaaccccattcagagcagtagcccagcctggcctgcaactgaaggctgttacttccgtcagcggacccggcgagcatctgcggaatgctctctggcacacagggcacactcccgatcaggtacgactgctgtggactgatccacgcaacgtgggctggagggacaagacaagttatagatggcagctgctgcataggccacaggtgggttacatacgggtcaaactttatgagggacctcaactcgttgccgattccggagttataattgacacatctatgagaggtggaagattgggagtgttctgtttctcgcaggagaacatcatttggtctaatttgcaatatcggtgcaatgataccgttcccgaagatttcgagccattcagaaggcagctcttgcagggacgggtctag

SEQ ID NO: 14984 - RNA, 2358 nt, synthetic construct
  misc_feature 1..2358: note = source = /note="Description of Artificial Sequence: Synthetic coding sequence"
  source 1..2358: mol_type = other RNA
atgaagcacacactggcactcttggctccattactcggcttagggttgggacttgcactgtcacaactggccgccggggcaaccgattgtaaatttctcggaccggctgagcacctgacctttaccccagctgcccgggccagatggctggctccccgcgttcgggctccaggattgctcgattcattatacggtacagtgagacggtttctctccgtggtgcaactgaacccctttcccagcgaactcgtgaaagcgctgctaaatgagctggcctctgtaaaagtgaatgaagtagttagatacgaagctgggtacgttgtctgtgcggtgattgcgggactgtacctcctgctcgtgccgaccgctggtctttgcttttgttgttgccgctgccaccgtaggtgtggtggacgggtgaagacggaacataaagccttagcttgcgaacgcgccgccttgatggtgttcctgctacttaccaccctcttgctactgataggtgttgtctgcgcttttgtgacaaaccagagaacacacgaacaaatggggccttctatcgaagctatgccagagactctgcttagtctatggggattagtgagcgacgtaccccaggaactacaggctgtggcccagcagttttccctgccccaggaacaagtcagtgaggaacttgatggagtgggtgtgagcataggatctgccatccatactcagctcagatccagcgtttatcctttattggcagcagtcggcagtttgggacaagtgcttcaggtaagcgtacatcatctgcaaactttaaacgccaccgtggtcgagcttcaagcaggacagcaggacctcgagcctgccattagagagcatcgggataggctccttgagctgcttcaagaggccagatgccagggcgactgcgctggcgccctcagttgggcgcgaacacttgagctcggcgcagatttttcccaggtgccatctgttgaccatgtcctccaccagcttaaaggagtgccagaggcgaacttctcctcaatggtgcaagaagaaaattctacattcaatgctctccccgctctagccgcaatgcagacatcttccgtggtgcaggagctaaaaaaggccgttgcccagcaacccgagggggtgaggactttggctgaagggtttccgggcctcgaagcagcgtcgagatgggcccaagcccttcaggaagtggaagagagcagccgtccatacctgcaggaagtgcaacgctatgagacgtataggtggatagtaggttgtgttctctgctctgtagtgctttttgtggttctgtgtaacctgctgggattgaatttaggcatctggggtctatcagcacgagacgacccatctcatccggaagccaaaggcgaggccggcgcaaggtttctgatggccggggttggattgtcattcctcttcgccgcaccactgattctgctagtgtttgcaactttccttgtcgggggtaatgttcaaacactcgtttgccagagctgggaaaatggtgaacttttcgaattcgccgatactcctggcaatctgcctccgagcatgaatcttagtcagctgttgggactgcgcaagaatatttcaatccatcaagcatatcagcagtgtaaggagggggctgcattgtggaccgtgctgcagcttaacgattcctatgatctagaggaacacctcgacattaatcagatccaaagacccgtcgtgaagacttcaatggaacagttagcacaagagttgcaaggcttggctcaggcccaggacaatagcgtgttagggcaacgtctccaggaggaagcccagggcttgcgaaacttacaccaggagaaagttgtgccacagcagtcactggttgccaaactgaatcttagcgtgagagctctagagtcgtccgcaccaaacttacagctggaaacttccgacgtcttggccaacgtaacctacctcaaaggagagcttccggcctgggctgcacgaatcttacggaatgtctctgaatgtttcctggcccgcgagatgggatatttttctcagtacgttgcctgggtgagagaagaggtgactcaaagaatcgccacctgccagccactgagcggcgcactggataattcaagggtgatactgtgtgacatgatggctgacccttggaacgctttttggttctgtctagcgtggtgcacattcttcctcatcccttccattatcttcgcagtcaagacatccaaatactttagacccatcagaaaaagactttcctccacatcttcagaggaaacccagctcttccatatacctcgcgtaacatccctcaagctgtag

SEQ ID NO: 14985 - RNA, 792 nt, synthetic construct
  misc_feature 1..792: note = source = /note="Description of Artificial Sequence: Synthetic coding sequence"
  source 1..792: mol_type = other RNA
atgggtagagttcttgaagaagcacgattcgcagtggcctttacagaatcaatgaaagagatggcccaagcgcaatggaaagcacgccagatcagcctagcagtcactagcgccgtccccgttcagccacatgccaagggaaaagtgtatgtgcaatctcagggaatcgcgaccacccccaatgctgcctttaattggaataccttcctccagcggtcggaaatcaatcagagcgccgataacctgcacatttttttgctcatatgcggtctgcgccaggtgaaagacccattgtacttggttgacgctttttctgcttggcatcaggaggagcctaacgtacacttggtgattgtgggtccagaagtagaccccgtctttacgagggaagtgaaggccaaggtcaaacgagccgcaggagttagattaattggagagatgccccaggaagatctccacgcagttgtcaagaactgctttgcagttgtaaattcgtcagtttctgaggggatgtctgccgctattctggaggcaatggatctcgaagttcctgttctcgccagaaatatccctggcaacgctgcggtcgtcaaacacgaggtgactggcttgctgtttagcaatccacaagaatttgtgcatctagcgaaaagactcgtgagtgatcctgcccttgaaaaggaaatcgtcgtgaatggaagagagtacgtacgtatgtaccatagctggcaagttgaacgagatacataccagcagctcataaggaagctggaaggcagcactgaggattag

SEQ ID NO: 14986 - RNA, 456 nt, synthetic construct
  misc_feature 1..456: note = source = /note="Description of Artificial Sequence: Synthetic coding sequence"
  source 1..456: mol_type = other RNA
atgaagacagcagtgatgaaggagttatattcatttctccaccaccagaacagatatggcagcgaacaggaatttgtggacgatctcaagaacatgtggtttggactgtacagccgcggaaacgaagaaggcgactcatcaggatttgaacatgtttttagcggcgaggtgaagaagggaaaagttactggatttcacaattggatccggttctacttggaggaaaaagaagggctggtggactactactcacacatttacgacggcccagtccccgtcaaaccaggaaggatcagcctcagttgtccagacatttacctcggacaggttcatctctgggaatggcaagaggtccaccggcatagcctacattccgttttccaccttatagaattgcgcgccagaaaagggcacgagggctcctgtgaaacagaagtgctttcttcgcttgactag

SEQ ID NO: 14987 - RNA, 363 nt, synthetic construct
  misc_feature 1..363: note = source = /note="Description of Artificial Sequence: Synthetic coding sequence"
  source 1..363: mol_type = other RNA
atgctccctcagtggctgttgctgctgttcctccttttctttttcctcttccttttaacacgaggatccctgtcgcccactaaatacaacttattagagcttaaagaatcctgtataagaaaccaagactgcgagaccggctgctgccagcgagcaccggacaactgcgagtctcactgtgccgaaaaaggatccgagggtagtctatgccaaactcaagtgtttttcggacagtaccgcgcctgtccctgcttaaggaacttgacctgtatttactctaaaaatgagaaatggctctccattgcatatggtaggtgtcagaagataggtaggcaaaaactcgccaagaaaatgttcttttag

SEQ ID NO: 14988 - RNA, 951 nt, synthetic construct
  misc_feature 1..951: note = source = /note="Description of Artificial Sequence: Synthetic coding sequence"
  source 1..951: mol_type = other RNA
atggctgaggctgcactggaagctgtacgttccgaattgagagaattccctgccgccgctagagaactgtgtgtccccctggccgtgccttaccttgataaacctcctaccccactgcatttttacagggactgggtgtgtcctaaccggccatgtatcatcagaaacgcattgcagcactggccggccctgcagaaatggtctctgccctatttccgcgctacagtaggtagcaccgaagtaagtgtcgctgtgacaccagacggatatgcagacgctgtgagaggagacagattcatgatgcccgcagaacgcagattacctctcagtttcgtgcttgatgtcttggaaggaagggcccagcatcctggtgtgctctacgtgcagaaacaatgtagcaacctcccctcagaactcccacagctgctgcctgatttagagtcccatgttccttgggccagcgaagcactgggcaagatgcccgacgccgtcaatttttggctgggagaggctgccgccgtgacatcgctgcacaaagaccactatgagaacctgtattgtgtggtgtccggagaaaaacatttcctcttccacccgccatccgacagaccttttataccttacgagctgtacactccggccacttaccagttgacagaagaaggcacctttaaggtcgtggacgaggaggcaatggaaaaagtaccctggattcccctggaccccttggctcctgacctggcccgctacccaagttatagtcaagcccaggctctgcgctgtactgtcagggccggtgaaatgctgtacctccctgccctatggtttcatcatgtccagcagtcccaaggttgcattgccgtgaatttttggtacgacatggaatatgatctgaaatactcatacttccagctcttagattccttaaccaaagcaagcggactcgattag

SEQ ID NO: 14989 - RNA, 657 nt, synthetic construct
  misc_feature 1..657: note = source = /note="Description of Artificial Sequence: Synthetic coding sequence"
  source 1..657: mol_type = other RNA
atgggacgcgtgttcctcacaggagaaaaggcaaatagtattctgaagcgatacccaagagcaaatggttttttcgaggagatccggcaaggtaacatagagcgggagtgcaaagaggagttctgtacctttgaggaagctagagaagcatttgagaacaatgaaaagacaaaggagttctggagcacctacaccaaagctcaacagggggaatctaacagagggtctgattggttccagttttatcttactttcccattaatcttcggcctgttcattatcctcctcgtcatcttcctcatttggagatgcttcttaagaaacaaaacgcgacgccagacagtgaccgagggccatatccctttcccacagcatctgaatatcatcacccctccccccccgccagatgaagtgttcgacagcagtggactatctccaggcttcctgggctatgttgtgggacgctctgattctgtctctacacgcctctccaattgtgatccccctccaacctatgaagaagctactggccaggtgaatctgcagcggtctgagactgagccacatcttgaccccccaccagagtacgaagacatcgtgaattccaattcagcatctgccattcccatggtgccagtagtgacgaccataaagtag

SEQ ID NO: 14990 - RNA, 909 nt, synthetic construct
  misc_feature 1..909: note = source = /note="Description of Artificial Sequence: Synthetic coding sequence"
  source 1..909: mol_type = other RNA
atggcaatgtttctggaatacaacaaggccattcggaactatacccgcttcgacgactggtacttatgggtccaaatgtataaagggacggttagtatgccagtatttcagagtttagaagcttattggccaggattgcaatctctcatcggggatattgataacgctatgcgcactttcttgaactattatacagtatggaagcaatttggtggtttacctgagttttataatataccacagggatataccgtggaaaaacgcgaggggtatccacttcggcctgagctgattgagtcagcaatgtatctgtatcgcgcgaccggcgatcctacattgttagagctgggacgtgacgccgttgaatccatcgagaagatcagcaaagtggagtgcggctttgcaaccatcaaagatctcagagaccataagcttgacaaccgcatggagtcgttctttctagctgaaacagttaaatacttatacctgctgttcgaccctaccaactttatccataacaacggttctacgttcgacgcagtaatcactccctatggcgaatgtatcctgggcgctggcggctacatttttaacactgaggcccacccaattgaccctgctgccttgcattgctgccagcgcctcaaggaggaacagtgggaagtggaggatctcatgagggaattctatagtctaaagcggagtagaagcaaatttcagaaaaacacagtatcttctggcccctgggagccacccgcacgcccaggcaccctcttttctccagaaaaccatgaccaggcgcgagaaaggaaacctgctaaacagaaagttcctcttttatcttgtccttcacagccttttacatcaaaacttgccttgctcggccaggtattcctcgacagcagctag

SEQ ID NO: 14991 - RNA, 459 nt, synthetic construct
  misc_feature 1..459: note = source = /note="Description of Artificial Sequence: Synthetic coding sequence"
  source 1..459: mol_type = other RNA
atgcttgttgatggtccaagtgaaagaccagctctgtgctttttactcctggctgttgctatgagcttttttggtagtgcactgtccatagatgagactcgggcccacctgctccttaaggaaaagatgatgcggttaggcggtcgacttgtgctcaacacaaaagaggaattggcaaatgagcgccttatgacactcaagattgcagaaatgaaagaagctatgagaacactgattttccccccctccatgcacttctttcaggcaaaacatttgattgagcgaagtcaggtatttaacatcctgagaatgatgccaaaaggtgccgcactgcatctccacgatattgggatcgtcaccatggattggttagtaagaaacgtcacctaccgcccgcattgtcatatctgctttacacctaggggaattatgcagtttcgcttcgctcacccaacttag

SEQ ID NO: 14992 - RNA, 3951 nt, synthetic construct
  misc_feature 1..3951: note = source = /note="Description of Artificial Sequence: Synthetic coding sequence"
  source 1..3951: mol_type = other RNA
atggagcctcgccttttctgttggactacccttttcctcctagcaggatggtgccttcctggccttccttgcccttctcggtgtctgtgtttcaaaagtactgtccgctgtatgcatctcatgctggatcacatcccccaagtgccccagcaaactaccgtgttggatcttcgcttcaatcgcataagagaaattcccgggtctgccttcaaaaagcttaaaaaccttaataccctactccttaacaataatcacatcaggaaaattagccgtaatgcatttgaaggtttagaaaaccttttgtatttatacctttataaaaacgagatacatgctctggacaaacagactttcaagggattaatctccctcgagcatctatatatccactttaatcagctggaaatgctgcaacccgagacttttggtgacctgttgagactagaaaggctgttcttgcacaataacaagctttccaagataccagctggcagtttctcaaatcttgatagcctgaagagactgagacttgattcgaatgctttagtgtgcgattgtgatcttatgtggttgggggagcttctgcaagggttcgcgcagcacggacatactcaggcggctgcaacttgtgagtacccaagacgtctgcacggtagagccgtggcgtctgtaactgtcgaggaatttaattgccagagcccacgcataactttcgaaccgcaggatgttgaagtcccatccggaaacaccgtctactttacatgccgcgccgagggcaatcctaagcctgaaatcatttggattcataataaccactcccttgacttggaagacgataccaggctgaacgtgtttgacgatggtaccttaatgattagaaatacgagagaaagtgatcaaggcgtttaccagtgtatggcaagaaactccgcaggggaagcaaaaacccaatcagccatgctgcgttattcttctttaccggctaagccctccttcgtgatccagccccaggataccgaggtactgataggtacaagtaccacacttgaatgcatggctactggacacccgcaccctctaattacctggacaagagacaacggcctcgagttggatgggtcaagacatgtggcaacatcatccggactgtacttacagaacatcacacagcgagatcatgggcgtttcacatgtcatgccaataattcccacgggactgtccaggctgccgcaaatatcatcgtgcaggctcctccccaatttaccgtcactccgaaggatcaagtcgtgcttgaggagcacgcggttgaatggctttgtgaggccgatggaaatcccccaccagtcatcgtttggaccaaaactggaggtcagttgcctgttgaaggacagcacacggtcctgtctagtggaacgttgagaatcgacagagccgcccagcacgaccaggggcaatatgaatgccaagccgtttcttctttaggagtcaaaaaggtttccgtccagttgaccgtgaaacccaaagctctagccgtgtttacccagctcccccaagacacttcagtggaggtcggaaaaaacataaatatttcctgtcatgcacagggagaaccccaacctataataacgtggaataaggagggtgtacaaataaccgagtcaggaaagttccacgtggacgacgaaggcactctgacaatatatgacgccggttttcccgaccaaggacggtacgaatgtgttgcacgcaactcattcggactggcagttacaaacatgtttctcaccgtaacggccattcaaggccggcaagctggggacgattttgtcgagtcatccatcctcgatgccgtccaacgggtcgactccgccatcaattcaacccgccggcacttatttagtcagaaaccacatacatcttcagatctcttagcccagtttcactacccaagggatccgcttattgttgagatggcgcgagcgggtgaaatcttcgaacacacactgcagctgatacgcgagcgagtcaagcaggggctgaccgtagacttggaaggcaaagagttccgttacaatgacctggtgagcccacgctctctgtctctgattgcaaatctctctggatgcaccgcacgccgaccgctgcccaactgctcaaatagatgttttcatgccaaatatagggcccacgatggaacgtgcaacaacctgcaacagccgacatggggtgctgccctgacagccttcgctcgcctcctccagccggcataccgcgacggcattcgtgctccacgcgggctaggattacctgtggggtcccgacagccattacccccccctcgactggttgctactgtgtgggcccgtgccgccgctgtgacccctgaccacagctatactagaatgcttatgcactggggatggtttctcgagcatgacctagatcatacagtgcctgctctgtctaccgcaagattctcagacggtcgcccctgctccagtgtctgcaccaacgaccctccatgcttccccatgaacacacgccatgccgaccctaggggcacccatgccccctgtatgttgttcgcacgaagttcccctgcttgtgcatccggaagaccaagcgccaccgtcgactccgtctatgccagggaacagattaaccagcagacagcctatatcgatggctctaacgtttacgggtcgtctgagagagaaagtcaagccctccgcgaccccagtgtgccccgaggattgctcaaaactggattcccctggcccccatcaggaaaaccactgttgccatttagtacgggcccacctacagagtgtgcccgccaagaacaggagtcaccgtgcttcctggccggagatcaccgggcaaacgaacatctggccctggccgctatgcacacattgtggtttcgagaacataacaggatggccaccgaattgtctgcgctaaacccccattgggaaggaaacactgtctaccaggaggccagaaaaatcgttggagcggaactccaacacattacctatagccactggttgccgaaggtgcttggcgatcccggaacccgtatgctgcgaggctatagaggatataacccaaacgtcaacgccggtatcataaactcattcgctactgctgcattccgcttcggtcatacactcattaatcccattctgtacaggctgaacgccacacttggtgaaatcagcgaaggacacttaccatttcataaggcattattctctcccagtcgaattatcaaagaaggcggtatcgaccctgtgcttcgcggactgttcggcgtggctgccaagtggcgcgcccctagttacctgctcagccccgagctgactcaaagactctttagtgccgcctacagcgctgctgtggacagtgcagcaaccatcatccagagaggcagggatcatggtatcccaccttacgtggacttccgagtcttctgtaatctcacgtcagtaaaaaatttcgaggacttacaaaatgaaatcaaagactctgaaatcaggcagaaactgcggaaactttatggatctccaggagacatcgacttatggcctgccttgatggtggaagatttgattccaggaacaagagtcggccctaccctgatgtgtttgttcgtgacccagttccagcgtttaagagatggcgatcgcttttggtacgagaaccccggagtatttactcctgctcagttaacacagttaaagcaggccagcctgtcgagagtattgtgcgacaacggcgattcaatccaacaggtccaagcggacgtctttgtaaaggctgaatacccccaggattaccttaattgtagtgaaatcccaaaagtggatctaagagtgtggcaggattgctgcgcagacaaacaggccgggggcacaccagaagcaggcagagtttatagatgctag

SEQ ID NO: 14993 - RNA, 891 nt, synthetic construct
  misc_feature 1..891: note = source = /note="Description of Artificial Sequence: Synthetic coding sequence"
  source 1..891: mol_type = other RNA
atggatccatcaaagatcgcccatactgagtaccctgtgaacactataatcatacacgaagacttcgacaataattcaatgtctaataatatagcactgttaaaaactgacaccgccatgcacttcggaaatctggttcaaagcatctgtttcctgggccgcatgctgcacaccccacctgtgctacaaaattgctgggtaagtggatggaaccctacctccgcgactgggaaccatatgaccatgagcgtactaaggaaaattttcgtgaaagaccttgatatgtgtccattatataagctccagaagactgagtgtggatctcacaccaaagaggagacaaagacagcttgcctgggcgaccctggctctccaatgatgtgtcaattgcagcagtttgacctctgggtgttgcgcggcgttctgaatttcggcggcgaaacctgcccaggcttattcctgtacacaaaagttgaggattactcaaaatggattacgtctaaggctgagcgcgctgggccccccctgagcagcctgcaccactgggaaaaacttatctctttttctcaccacggaccaaatgctactatgacccagaagacatattcagattcagagttgggacatgttggcagttacctgcaggggcagagaagaactatcacacacagtagattggggaacagctctagggacagcttagacgtacgcgagaaggatgttaaagagtctgggaggagccctgaagctagcgtgcagccactttactacgattattatggaggtgaagtcggtgaaggtcgtatttttgctggccagaacaggttataccagcctgaggagattatcttggtatccttcgttctcgtgtttttctgtagttcaatttag

SEQ ID NO: 14994 - RNA, 2808 nt, synthetic construct
  misc_feature 1..2808: note = source = /note="Description of Artificial Sequence: Synthetic coding sequence"
  source 1..2808: mol_type = other RNA
atgaggaagccacgccgcaagtctaggcaaaacgccgaaggtagacgatctcccagcccctactcactcaagtgttctcccacacgggaaaccctcacgtatgcacaagcccagcgaattgtcgaagttgacatcgacggtagactgcaccgaatctccatatacgacccactcaagatcatcacagaagacgagctgacagcacaagacattacagaatgcaatagcaataaggaaaattcagagcagcctcagttcccaggcaaatccaaaaagccttctagcaaaggtaagaaaaaggaatcatgctctaaacacgcctccggcacatcctttcaccttcctcagccatcatttaggatggtagattccggcatccagccagaggctccacccctgccagctgcctactatcgctacatcgagaaaccacccgaggatctagacgccgaggtagagtatgacatggatgaagaagatttagcttggctggacatggttaatgaaaaaagacgagtcgacggacatagtctggtgagcgctgacacctttgagttactggtcgatagattggagaaagaatcctatctggaatcaagatcaagcggagctcagcaaagtctgatagatgaagatgccttttgttgtgtctgtctagacgatgaatgtcataacagcaacgtgattttattctgtgatatatgtaacctggctgtccaccaggagtgctacggcgtcccctacattcccgaaggtcagtggctgtgcagatgctgcctgcagtcccctagcagaccggttgactgcattctctgtccgaataagggaggcgcctttaaacaaacttctgatggtcattgggcgcacgtagtatgtgctatctggatacctgaggtgtgtttcgccaacacggtttttctggagcccatcgaggggatcgataatatccctcccgcaagatggaaactgacatgctatatttgcaagcaaaaaggcctaggtgccgccatccagtgtcacaaggtaaactgctataccgccttccacgtcacatgtgcacaaagagctgggctttttatgaaaatagagcccatgagggaaactagcttgaacggaacaatatttaccgttaggaaaacggcctattgtgaagctcactcaccccccggagccgcaaccgcacggagaaaaggtgattcccctaggagcatctcagaaaccggagatgaagagggtttaaaggagggggacggagaggaggaggaagaggaggaggtggaagaggaggaacaagaggcccagggtggagtctccggaagtctcaaaggtgttcctaagaaaagcaaaatgagtctgaaacagaaaatcaaaaaagaaccagaggaggccggacaagatacccccagtaccctgcccatgctggccgtgcctcaaataccaagctatcgacttaacaaaatctgcagtggattgagttttcagcgcaagaatcaatttatgcagcgtcttcataattactggctcttgaagcggcaggccagaaacggggtgccactgatacgccgcctacacagtcatttgcagagtcaacgtaacgccgagcaaagagaacaggatgagaaaacctcagcggtcaaggaagagctgaagtattggcagaaactgcggcacgatttagagcgagctcgtctgttgattgaactgataagaaaaagggaaaaactgaaaagggagcaagtgaaggtccaacaggctgctatggagctcgaactgatgcctttcaacgtccttttgcgcacgacacttgatctactgcaggagaaggaccccgcacatatcttcgctgagccagtcaatctaagcgaagtgccagactatctcgaatttatatccaagccgatggactttagtacaatgcggaggaaactggagagccatctgtaccgaaccctggaggaatttgaagaagattttaacctcattgtcaccaactgcatgaagtacaatgccaaagacactatttttcacagagcagcagttcgcttgagggatttagggggtgcaattttaaggcatgctcgtaggcaggccgaaaacattggatacgacccggagagaggaacacatctgcccgaatccccgaagctcgaggatttctaccggtttagttgggaggacgggatgactaatggcttcggaaaacacaccgaatctggatccgatagtgagtgctcgttgggcctgagcggtgggctggcttttgaggcttgtagcggactcacaccaccaaagcgctcaagagggaaaccagctttgtcacgggtgcccttcttggaaggagtcaacggcgatagtgactacaatggctctggcaggtccttgcttttgcccttcgaagacaggggcgatctggaacctctggagctagtgtgggcaaagtgtagaggatacccaagttacccagcattaatcatagacccaaagatgcccagggaaggattgctacataacggagtccctatacccgtcccacccctcgatgtactgaagttgggcgaacagaagcaggccgaagcaggagagaaattgttcctggtgctcttcttcgacaacaaacggacctggcaatggttaccaagggataaagtcctcccactgggagtggaagatactgttgataaacttaagatgctggaagggcgcaaaacttctatccgtaagtccgtgcaggttgcctatgatagggccatgatacacctcagcagagtccggggaccacactcattcgttacatcctcttatctttag

SEQ ID NO: 14995 - RNA, 270 nt, synthetic construct; identical to SEQ ID NO: 13356
  misc_feature 1..270: note = source = /note="Description of Artificial Sequence: Synthetic coding sequence"
  source 1..270: mol_type = other RNA

SEQ ID NO: 14996 - RNA, 657 nt, synthetic construct
  misc_feature 1..657: note = source = /note="Description of Artificial Sequence: Synthetic coding sequence"
  source 1..657: mol_type = other RNA
atggggcgagtcttcctcactggggaaaaagccaacagcatattgaaaagatacccaagggcgaacggattcttcgaggaaattagacagggtaatatagagagggagtgcaaggaggaattttgcacttttgaagaagcccgcgaggctttcgagaataatgagaagacgaaggagttttggtccacgtacaccaaggcccagcagggagaatccaataggggctcagactggtttcagttttacttaacttttccactgatattcggcctgttcatcatcctacttgtgatcttcttaatatggcgctgttttttgaggaacaaaacacggcggcagacagtcaccgaaggacatataccattcccccaacacctaaatataattaccccgccaccaccacctgatgaagtgtttgactcaagcggactcagtccgggattccttggctatgtcgtgggtagatccgactccgtgtccactaggctgagcaactgcgaccctccgccaacatatgaagaggctactgggcaagttaatctccagaggtctgagacagagccgcacctggatccgccacctgaatacgaggatattgtgaatagcaacagtgcatccgcaattccaatggttccagtcgtcactaccatcaaatag

SEQ ID NO: 14997 - RNA, 540 nt, synthetic construct
  misc_feature 1..540: note = source = /note="Description of Artificial Sequence: Synthetic coding sequence"
  source 1..540: mol_type = other RNA
atgtcccttggccccgaagttttcctgggcccacctgaggcgcagtcatttttaagctcacatacccgcatacctcgagcaaatcactgggacctggaactgctcacccccggcaatttggagcgagaatgcctggaggaacgatgttcttgggaagaagctagggagtactttgaggacaatacactgacagaaaggttttgggaatcttacatctataacggtaaggggggcaggggcagggttgatgttgcatccctcgccgtagggttaacaggtggaattcttctgattgtgctggctggcttgggcgccttctggtatctgagatggcgccagcacagaggccaacaaccatgtccccaggaagccggactgatctccccccttagccctcttaaccctcttggacctcctacccctctcccccccccacctccccctccacctgggctgccaacctacgaacaagccttggccgcctccggtgtgcatgacgctcctcctcccccttacacatcccttcggcgtccccactag

SEQ ID NO: 14998 - RNA, 765 nt, synthetic construct
  misc_feature 1..765: note = source = /note="Description of Artificial Sequence: Synthetic coding sequence"
  source 1..765: mol_type = other RNA
atgacactagaagacatcgtgcagagggaagtgtggggtacggttgtcgctcgcggagcccctgcccccccaggtcctgtgccaacaagaggagctgccagtcggcggctgagcgtgtccccagcgtctacttcagagaccagtctgtaccaggtgctcttgggcgctcgtcagttagtgcagcccggtcctcacgccatgtatgcaagagtgcgacaggtagagtctaacccactttatcaagggacagctagtagtgcagatgttgccctggtagagctggaggcccccgtcccgtttaccaattatatcctgcccgtgtgcctgccagacccaagtgttattttcgagacaggtatgaactgttgggtgacaggctggggttcaccaagtgaggaagacctgcttcccgagcctcgtatacttcaaaagttagccgtgcctattatagataccccaaaatgcaacctattgtatagcaaagacactgaatttggttatcagcccaagacaattaaaaacgacatgctatgtgcaggtttcgaggaggggaaaaaggatgcgtgtaagggcgattcaggcggtccactcgtctgtttggtcgggcaatcttggctgcaagccggggttatttcgtggggagaaggctgtgcacggcaaaatcgccccggtgtatatatccgcgtgacagcccaccataattggattcatcgcatcattcctaaattgcagtttcaacctgccagactaggtggacagaaatag

SEQ ID NO: 14999 - RNA, 1899 nt, synthetic construct
  misc_feature 1..1899: note = source = /note="Description of Artificial Sequence: Synthetic coding sequence"
  source 1..1899: mol_type = other RNA
atgacgcccccggttttaacaactgcggaaacatcggtaaaacctagcgtgagcgccttcacacacagcccacccgaaaacacaaccggcatctcaagcacaatctctttccactcccgtactttaaatttgacagacgtaatcgaagagctcgcccaggcatcgacacaaactttaaagtctacaatcgcctccgagaccaccctatcgtctaagtcacatcagtcgaccaccacccgaaaggcaatcatccggcattctactattccacctttcctttccagctccgcaactctgatgcctgtgcctatcagtcctcctttcactcagagggccgtcaccgataatgttgcaactccgattagcggccttatgaccaatacagttgtcaagcttcacgagtctagcagacataacgcaaagccccagcagcttgttgctgaggtagccactagccctaaagtgcaccccaacgccaagtttaccataggaaccactcactttatttatagcaatttactccactctacccctatgccagctctcacaacagtgaaatctcaaaactccaaactgactccatcaccatgggcagaaaatcagttttggcacaaaccctattccgaaatcgcagagaaaggcaagaaacctgaagtcagtatgctggcgacgactggcttatcggaagcaacaacccttgtttcagactgggacggccaaaagaacactaagaagtcagactttgacaagaagcctgtgcaagaggcgaccactagcaaacttttgccatttgactcattaagccgctatattttcgaaaagcctaggattgtaggtgggaaagccgcgagtttcaccattcctgccaattccgacgctttcctcccatgtgaagccgtcggaaaccctctcccgaccatacattggactcgcgtaccctccggattagacctttccaaacggaaacagaacagcagagtacaagtgctccccaatggtacactgagcatccaaagagtggaaatccaggaccgcggccagtatttgtgttccgcctctaatctattcggcaccgaccacttacatgttaccttgagcgtagtttcttacccaccacggattttggagagacgcaccaaagaaatcaccgtgcactcaggctccactgtagagttaaaatgcagagctgaaggcagaccctcccccacagtgacttggatcctggctaaccagaccgtggtgtcagaaagtagccaaggcagccgtcaagccgtcgttactgtggatggtactcttgtgttacataatcttagcatttatgatagaggcttctataagtgtgtcgcttccaatcctggagggcaggattcattactggtaaaaatccaagtgattgccgcaccaccagtcattctggagcagcggagacaggtgatagtaggcacctggggcgagtcattaaagttaccctgtacagctaaagggactcctcaacctagcgtttactgggttttgtcagatggcacagaagtcaaacccctccagttcacaaactcaaaactcttcctttttagcaacgggactctgtacatccgcaatttagcctccagcgatcgcggaacttacgaatgcatcgcaacctcttcaacagggtccgaaaggcgcgtcgtgatgttaactatggaagaacgcgtcacctccccccggattgaagctgcatcgcagaaacggaccgaggttaatttcggagataaactgcttctaaactgctcagccacaggggagccgaaaccccagatcatgtggcgactacccagtaaagcagttgttgatcagcagcatagagtggctgccggttctacatcaaccctcatggacccctgcctgcttgaccaatag

SEQ ID NO: 15000 - RNA, 681 nt, synthetic construct
  misc_feature 1..681: note = source = /note="Description of Artificial Sequence: Synthetic coding sequence"
  source 1..681: mol_type = other RNA
atggacatcattgtcctacttcccaaggggcactgcactaagatccaagaattacagatgaccaccgtgctgaaacaaaatgtccatgtcttcggcgtagaggggaattctgatgagctcgatgaacctattaaaacagtgtttgctgatgtcgcctttgttaagaagcacaacctgatgtctctcaatagcattaattggtctagagtcctggtccagatggcccaccatttcttcgcatatttccagtgcacgccttctctcgatactcacccgttaccacttgtagaggtggtagtgccaacaggggcagccggaaatcttgctgctggttatatcgcccagaaaattggtttaccgatccgccttgtggttgcagtcaacaggaacgatatcatccatagaacagtgcaacagggagacttcagtctgtccgaggccgtcaagtcaacgctcgcctccgctatggatattcaggtgccctataacatggaacgggtgttctggctactctccgggtctgattcacaggttacacgagccctcatggaacaattcgaacgcacacagagcgtgaacctccctaaagagctgcactccaagcattctcctgtgctccctcgaccttgcctatgctcacaggtgcccggttcatgcccaggctgttggccagatccatag

SEQ ID NO: 15001 - RNA, 729 nt, synthetic construct
  misc_feature 1..729: note = source = /note="Description of Artificial Sequence: Synthetic coding sequence"
  source 1..729: mol_type = other RNA
atgtttcagacggggggactcattgtattctacggactacttgctcagacacttcccctgaacgtcaaccctgcactccccttatccccaaccggcttggctggttcactcactaatgcgctgtcaaatggtctcctgagcggtggcctgttaggcatcttagaaaatctccctctgcttgacattctcaagccaggtggcggaacttcagggggcctgctcgggggtctattaggtaaagtaactagtgtcattccaggcctcaataatatcatcgatatcaaagtgaccgatccccagctactggaacttggccttgtgcagtctcctgacggacatcggttgtatgtgactatccccctcgggattaagctccaggtcaacacaccacttgttggcgcaagcctcctaagacttgccgtgaaacttgatattaccgcagaaattctcgccgtcagagataagcaggagcgtatccacctcgttttgggcgactgtacacactcaccaggcagccttcaaatctccctgctcgacggtttgggccccctcccgatccagggcttgctggatagtctgactggcatcttgaataaagtgctcccggagctagtgcaaggaaacgtttgtccacttgtaaatgaagtactccgcggcttggacattacactggtgcatgatatcgtcaacatgttaattcacggattgcaatttgtcatcaaagtgtag

SEQ ID NO: 15002 - RNA, 1422 nt, synthetic construct
  misc_feature 1..1422: note = source = /note="Description of Artificial Sequence: Synthetic coding sequence"
  source 1..1422: mol_type = other RNA
atgtccttggaggctagtctatgttcattagaggaatgtgccgcatttcagccaagtagcccatcccccctgcagcctcaaggtccagtgaagtctaataatatcgtcactgttaccggcatctctctctgcctgtttataattatagccaccgtcctgatcactctctggagaaggttcggacgcccagctaagtgttccacaccagccaggcataatagtatacacagtccttcattcagaaaaaattcagacgaagagaatatttgtgaattgtctgaacaacgtggctccttttccgatggcggcgatggtcctaccggaagcccaggcgacacaggcataccacttacctatcgtagatcaggtccagtccctccggaagatgatgcaagcggctctgagagtttccagtcaaacgcccagaaaattatccccccattatttagctaccgccttgctcagcagcagttgaaggaaatgaagaaaaagggacttacagagacgaccaaagtttaccacgtgagtcagtccccacttacggacactgctatagacgcagcgcccagcgcaccccttgacttggaatctcctgaagaagctgccgccaataaatttagaatcaaaagtccctttcccgaacagcccgcagtgtccgctggcgaacggcccccctcccgtctggatctcaatgtcacgcaagcatcctgcgctatttccccaagtcaaacgctaatccgtaaatctcaggcccgccatgttggatcccgggggggtccctccgaacgtagtcatgctcggaacgcccactttcgccgaacagcatccttccatgaagctagacaggcccgcccatttagagagagaagcatgagcacccttacacctcgtcaagcacctgcatactcatcaagaacacgaacttgcgaacaggccgaagatcgctttcggccacagtcacggggggctcacctgtttcctgagaaattggagcatttccaagaggcctccgggacgcgcggacccctgaatccactcccaaaatcctatacactcggccagcctctgaggaaacccgacctcggcgatcatcaggcaggtctcgttgccggaatagagagaactgaaccgcatcgcgcacgcagaggaccctctccaagccacaagtcagtgtctcgtaagcaaagtagccccattagccccaaagataattaccagagagtgagttccctcagcccttctcagtgtcgtaaggacaagtgtcagtctttccccacacaccccgaatttgctttctatgacaatacatctttcggactgaccgaagcagaacaaagaatgcttgatttacccggatattttggatcaaatgaagaggatgagacaactagtaccctgtccgtggaaaaactggtcatttag

SEQ ID NO: 15003 - RNA, 2310 nt, synthetic construct
  misc_feature 1..2310: note = source = /note="Description of Artificial Sequence: Synthetic coding sequence"
  source 1..2310: mol_type = other RNA
atgctcagcaagaaagggatcttcccctggatactaacctgtatatccgaggaaatggcattcagaactatctgtgttctggttggagttttcatttgtagcatctgcgtaaagggatcctctcagccccaagcgcgcgtctacctcactttcgatgaactacgtgagacgaaaacttccgaatacttcagtctatctcaccacccacttgactatcgaattctgcttatggacgaggatcaggatagaatatacgtaggaagcaaggaccatattctgagtttaaacattaataatatctcccaggaggccctcagcgtattttggcctgcttcaaccatcaaagtcgaggaatgcaagatggctggaaaggaccctacccatggctgtgggaactttgtgagagtgattcagaccttcaataggacacacctctatgtatgcggctccggcgctttttcccccgtgtgtacctacctgaatcgtggacgacggtctgaagatcaagtattcatgattgactccaagtgtgaaagtggcaagggacggtgttctttcaatcccaatgtgaatacagtttcagttatgattaatgaggagctgttcagcggaatgtatatagactttatgggtactgacgccgcaattttcagaagtcttacaaagagaaacgccgtcaggaccgaccaacacaactctaagtggctgtctgaacctatgttcgtggatgcacacgtaatacccgatggaaccgaccctaatgacgcgaaggtgtattttttctttaaggagaagctaactgataataataggagcacaaaacaaatccactctatgattgcaagaatctgccccaatgacactggagggctgcgttctctggtaaataaatggaccacatttctgaaggctagattggtgtgttctgtaacagatgaagacggccccgagactcacttcgatgaactagaagacgtgttcctgctcgaaaccgataaccctcggaccacccttgtgtacggcatattcaccacttcttcttcagtttttaagggctccgctgtttgcgtgtaccacctctcggatatccaaaccgtctttaatggtccattcgcccataaagaaggtccaaaccatcaactcattagttaccaaggacgaattccatatccacgtcccggcacctgcccaggaggagccttcacccctaacatgagaaccactaaggagtttccagacgatgtggtcacattcattcgcaaccaccccctgatgtataatagcatataccctattcacaaaagacctctgatcgttagaattgggacagattacaaatacacaaagatcgccgtagatcgggttaatgccgcagatggaaggtatcatgtgctgtttctgggcaccgacaggggcactgtgcagaaagtagtggtgttgccaaccaataatagcgtgtccggcgagcttatcctggaggaactggaagtattcaagaatcacgctccgattactactatgaagataagctcaaaaaaacagcagctgtatgtctcgtctaatgagggtgtctctcaagtgagcctccatcgctgccacatatacgggactgcctgcgctgattgctgccttgcccgggacccctactgcgcctgggatggccactcctgttcgcgcttctaccctacaggaaaaagacggtcacgtcgccaggatgtgagacacggcaaccccctgacacagtgtagagggttcaatctaaaagcctataggaacgccgctgaaattgttcaatacggggtgaaaaataacaccactttcttggaatgtgcccccaagtctccacaagcctccataaaatggcttcttcaaaaggataaagacaggcgtaaagaagtgaaattaaatgagagaatcatagcaacttcccaaggactgctgataaggtccgtccaaggctcagaccaagggctgtaccactgcattgcaactgagaactcttttaagcagactatcgcaaagatcaatttcaaggtactcgactccgaaatggtggccgtggtgacggataaatggagcccatggacctgggcctcttctgtcagagctctccccttccatccaaaagatattatgggcgccttttcccacagtgaaatgcaaatgataaatcaatattgtaaagacacccgccagcagcaccaacaaggagacgaatcccagaaaatgaggggagactacggaaagcttaaggccttgatcaactctcgtaaatcgcggaatagaaggaaccagctgcctgaaagttag

SEQ ID NO: 15004 - RNA, 942 nt, synthetic construct
  misc_feature 1..942: note = source = /note="Description of Artificial Sequence: Synthetic coding sequence"
  source 1..942: mol_type = other RNA
atgccaggctggctaactcttccaaccctgtgtcgattcctcctatgggcttttacaatatttcacaaagcgcaaggtgaccccgcaagccacccaggaactaccccaccctcatataaagtgaggtggtctaaggttgaacccggcgagctgagagaaacgctgatactcattacaaatggtctgcacgccaggggttacggaccacttggagggagggctcgtatgagacgcgggcataggttagacgcctcattggttatagctggcgtcaggctggaggacgaagggcggtaccgttgcgagttgattaatggaatcgaggacgaatctgtcgctcttacattgtctcttgaaggagtggttttcccttaccaacctagcagaggaagataccagtttaattattacgaagctaagcaggcttgcgaggagcaggatggcaggttagcaacttatagtcagttataccaagcctggactgaaggactggactggtgtaatgctggctggctgcttgagggctcagtaagatatcccgttctaacagctagagcgccctgcggcggccgcggaagacccggtatcaggagttatggacctagagatcgaatgagagacaggtacgatgccttctgcttcactagtgctcttgctggccaggtgttctttgtgcccggccgactgactcttagcgaagctcacgccgcttgccgaagaaggggggccgtggtcgccaaagtgggccacctgtatgccgcctggaagtttagcggcctcgaccagtgtgacggaggctggctcgcagacgggagcgtgcggtttcccattactacacccagacccagatgcggaggactgcccgatcctggtgtacgatccttcggattcccccgcccacagcaggccgcctatggaacatattgttacgccgagaattag

SEQ ID NO: 15005 - RNA, 1089 nt, synthetic construct
  misc_feature 1..1089: note = source = /note="Description of Artificial Sequence: Synthetic coding sequence"
  source 1..1089: mol_type = other RNA
atggcatggaccttcgaatgctctcgcactaccagcccggagccgctaagtactagcccttgccgtacgacttcatcaaggaactcacccaccatgtcttgtcctgctagtgtcgcctgcgagccatctacatccaccaccacgtctagtcctccaaaagcctgtctcacccgcccgtcttccccttctccatcttgcagcacttccgcctggcacaacaaaaataacctgatttcgaaagtacccagaggggctctctccaggcaaacccaactcagggagctgtatcttcaacacaaccagctgacagactcagggctggacgcaaccaccttctctaagctgcattcactcgaatacctggacttatcccacaatcaacttacaaccgtgcccgcaggcctgccacgaaccctggcaattctccatctcggtcggaacagaatcagacaggtcgaggccgctagactgcacggcgctagaggactcaggtaccttctcctccagcataatcaacttggcagctcaggcctgccagcgggagctcttcgcccattgcgggggttgcacaccctccatctttacggaaatggcttggatagagtgccccctgctcttcccagacgattacgcgccctggtcctccctcacaaccatgttgctgctttaggtgctagagacctggtcgcaacgcctggcctcactgaactgaatctcgcttataatcgcctcgcctccgccagagtccaccaccgcgcgtttaggcgcttgcgagcactgcgcagcctcgaccttgccggcaaccagctcactcgcctccccatgggcctgccaactgggctgcgaacgcttcagttgcagcggaaccagctgagaatgttggagccagaaccgctggccggactggatcaactccgggaacttagtctggcccacaacagattgcgggtgggggatatcggtccaggaacatggcatgaattacaagcattacaggttagacacagattagtttctcataccgtcccacgggctccaccctctccttgcctcccctgtcacgtgccgaacatactggtgagctggtag

SEQ ID NO: 15006 - RNA, 900 nt, synthetic construct
  misc_feature 1..900: note = source = /note="Description of Artificial Sequence: Synthetic coding sequence"
  source 1..900: mol_type = other RNA
atgctccacccagaaacaagtcccggaagaggccacttactcgctgtattgctagccttgctaggaaccgcttgggcagaagtctggcctccccagcttcaggagcaggcccccatggccggggcattaaacagaaaagagtccttcctcctgcttagtctgcataaccggctccgctcgtgggtgcagcctcccgccgctgacatgagaagactggactggtctgattcactggctcagctcgcccagggctctccactgtggaatcctaatcccgaacccggtgtcagacctgtcgctcatcccgcgagcggccttgaacatgcagcagctccccgagcctggtgccctttgagcaagtggagcctgtggtttgccgagggtcagaggtattcacatgccgctggggagtgtgccaggaacgcaacatgcactcactatacacagctcgtttgggccaccagcagccaactcggatgcggacgccacttatgcagtgccgggcaggcagcaattgaagcctttgtgtgcgcttactcgccaagaggcaattgggaagtaaacggaaaaacaatcgtcccttacaagaagggcgcctggtgtagtctttgcactgcctcagtgtcaggttgctttaaggcttgggatcacgccggaggactttgcgaagtacctcggaatccttgcagaatgtcatgccagaaccacggacgtctaaatatttccacctgccactgtcactgtccccctggctataccggtcgttactgccaagttaggtgttccttgcaatgtgtgcacggccgctttcgcgaggaggagtgcagctgtgtgtgcgatataggctacgaacccagtgtacccccgaggtgcattttcccctcaacacctgtgacttag

SEQ ID NO: 15007 - RNA, 1047 nt, synthetic construct
  misc_feature 1..1047: note = source = /note="Description of Artificial Sequence: Synthetic coding sequence"
  source 1..1047: mol_type = other RNA
atgcttgatactaatctgattctgttgccccttttccagtttattgtcccaaaggaatggaattctaagtacaggcctgtctgtatccacttggctggtactggagatcatcattactggagacgtcgcactttaatggcacgcccaatgattaaagaggctaggatggcttctctgttgctggagaacccctattacggctgccgaaaacctaaagatcaagtgcgatctagcctgaagaacgtgtccgatttatttgtgatgggtggagccctggttctcgagagtgccgctttgttacactggttggaacgcgaggggtatggccctttaggtatgacagggatttctatggggggccacatggcctctttggcagtctctaattggccaaaaccaatgccactgataccttgcttgtcttggtctacagcatcaggcgtcttcacaaccactgattcttttaaaatgggacaggaattcgttaagcacttcaccagcagcgccgacaaactcacaaacctcaacctggtctcccgcaccctcaacctggacatatctaatcaggtggtcagtcagaaaccagccgattgtcataatagcagtaaaacctccgtgagtgccactagcgagggactactactgcaagatacctctaaaatgaaaagattcaaccagaccttaagcacaaacaaatcgggatatacaagccgtaatcctcagagttaccacctcctcagtaaagagcagtcaagaaacagtttaagaaaggagtcactgatctttatgaagggagtaatggacgaatgtacacatgtggcgaatttcagtgtcccagtcgacccttcactgattattgtggtgcaagcaaaggaggatgcctatataccaagaaccggggtgcggtcactgcaggaaatttggcccggttgcgagatacggtatctggagggtgggcatatcagtgcttatttattcaaacaagggttattcagacaagcaatttacgacgcctttgatcgatttttacataagtatgcgaactag

SEQ ID NO: 15008 - RNA, 1044 nt, synthetic construct
  misc_feature 1..1044: note = source = /note="Description of Artificial Sequence: Synthetic coding sequence"
  source 1..1044: mol_type = other RNA
atgcgtgcatgcatatccctcgttctagctgtgctgtgcggcctggcttgggcggacctctactcggccccaacctcatgtcaggggaggtgctatgaagcatttgacaaacaccatcagtgccattgtaatgctcgatgtcaggaatttggcaattgttgtaaggacttcgagtctttgtgtagcgaccacgaggtaagtcattcaagtgacgccatcaccaaagaagagatccagagcatcagcgagaaaatttacagagcagatacaaataaggcccagaaggaagacattgtgttgaactcccagaactgcatcagcccttcagagacacgaaaccaggttgaccggtgtcccaaaccactgtttacctatgtaaatgagaaactgtttagtaagccaacatacgccgcttttattaaccttctaaataattatcaaagagcaacaggccatggcgagcatttttcagctcaggaactcgccgagcaggatgccttcctaagagaaattatgaagactgctgtcatgaaggaactgtattcttttttacaccaccagaatagatacggcagcgagcaggagtttgtcgacgatcttaagaacatgtggtttggcctgtattctcgcggcaatgaggaaggcgattcgtcaggattcgaacacgtgtttagcggggaggttaagaagggaaaggtgaccgggtttcataactggatacgattctacttagaggagaaagagggactggttgactactattcacatatctacgacggaccatgggacagctatccagatgttctagctatgcagttcaactgggacggttattataaggaggtaggttcggcttttattgggtcttccccagagtttgaatttgcgctatactctctatgctttatcgcccggcccggtaaggtttgccagctctccctcggtggataccccctcgctgtcaggacatacacctgggacaaatctacatatggcaatggaaaaaagtatatcgcgacagcttacatcgtctcctcaacctag

SEQ ID NO: 15009 - RNA, 864 nt, synthetic construct
  misc_feature 1..864: note = source = /note="Description of Artificial Sequence: Synthetic coding sequence"
  source 1..864: mol_type = other RNA
atgctcaaaaaaatctctgtcggcgttgccggggatctcaacacagtgaccatgaaactcggctgcgtcctcatggcatgggccctttacttatctctgggggtcttatgggtagcgcagatgttgttagcagcctccttcgagacattgcagtgtgagggccctgtttgcaccgaagaaagctcttgtcacacagaggacgacctgaccgatgcccgggaggccgggttccaggtgaaagcatataccttcagtgagccattccacctaatcgtctcgtatgaactttttcccgcccctatcttgagagcagtcccttctgccgaaccccaggccgggagcccgatgaccctgagctgtcaaactaaactgcccctgcagagaagcgccgcccgcctacttttctctttctacaaagacggtcggattgtccaaagtcgcggactttcatcagagtttcagattcccacggcttccgaagatcacagtggtagttattggtgcgaagctgccaccgaagataatcaggtgtggaagcaatcgcctcaactggagatcagagtacagggcgcttcctccagcgccgcccccccgacactaaatcctgcaccccagaagtcagccgctcctggtactgcacctgaagaggcacccggacctttaccgcctccccccacgccaagtagtgaagatcccggttttagttctcccctcggaatgcccgaccctcatctttaccatcagatgggcctactgctgaagcacatgcaggacgtaagagtgctgctgggtcacctacttatggaactcagggaactcagtggacatcggaaacctggcactactaaagcaaccgcggagtag

SEQ ID NO: 15010 - RNA, 1815 nt, synthetic construct
  misc_feature 1..1815: note = source = /note="Description of Artificial Sequence: Synthetic coding sequence"
  source 1..1815: mol_type = other RNA
atgatgcgcgctgtttgggaagccttagcggcacttgccgccgtcgcgtgcctggtcggcgcagttcgcggaggacccggcctgtcgatgttcgctggacaagccgcccagcctgacccgtgcagtgacgagaatggacatcctaggagatgtatcccagattttgtgaatgctgccttcggcaaagacgtccgggtctcttcaacctgcggtcgccctcccgcccgatattgcgtcgtgagtgagcgtggagaagagagactgcgaagttgtcatttgtgtaatgcctctgatcccaagaaagcccaccctcctgcctttctgaccgacctgaataacccccacaacctgacttgctggcagtcagaaaattaccttcagttccctcacaacgtgaccctgacacttagcctagggaagaagtttgaagtcacatacgtgtccctgcaattttgctcacctcggcccgaatccatggcaatctataaatcaatggattatggcagaacctgggtaccttttcaattttatagtacgcagtgccgcaagatgtataaccgcccccaccgagcacccataacgaagcaaaacgaacaagaggctgtatgtactgattcccacaccgacatgcgcccgctttctggtggcctcatcgcctttagcaccctggacggcagaccctccgcacatgactttgataattcaccagtgcttcaggattgggtcacagccactgacatcagggtggctttttctcggctgcatactttcggtgatgagaacgaagacgacagcgagctcgcaagggattcttatttttatgccgtatccgatttgcaagtgggcggcaggtgcaaatgcaatggccacgcagccagatgtgtaagagacagagacgactcattggtttgcgactgcaggcataacactgctggcccagaatgtgatcgctgcaaaccctttcattatgaccgcccatggcagcgtgccaccgccagagaggcaaacgaatgcgtcgcatgtaactgcaatctgcacgctcgacgatgccggttcaatatggaattgtacaaattaagtggtcggaaatcaggtggcgtgtgcttgaactgcagacacaacaccgcaggacgccactgccattattgtaaggaaggttactatcgagatatgggtaagcctatcactcataggaaagcttgcaaagcttgcgactgtcacccagtaggagcggcaggcaagacttgtaatcagactacgggccaatgcccctgcaaggatggcgtgaccggcattacctgcaatcgctgtgccaaggggtatcagcaatcaagatcacccatagctccctgtattaagattccagtggcccccccgacgactgccgcctcgagtgttgaggaacctgaggactgcgactcatactgtaaagcttccaaaggtaagctgaagataaacatgaagaaatattgcaagaaagactacgctgttcagatccacatcctcaaagctgataaggccggcgactggtggaagttcactgttaacataattagcgtctataaacaggggacttcacgaattagaaggggggatcagagtttgtggatccggtcaagagacatcgcctgtaaatgcccaaaaatcaaacctctcaagaaatatttgttgctcgggaacgccgaagattcacccgaccagtcaggaattgtggccgacaaatctagcctcgttatccagtggcgagatacatgggcaaggcgtctgcggaagttccaacagagagaaaagaagggtaagtgtaaaaaggcttag

SEQ ID NO: 15011 - RNA, 1005 nt, synthetic construct
  misc_feature 1..1005: note = source = /note="Description of Artificial Sequence: Synthetic coding sequence"
  source 1..1005: mol_type = other RNA
atgaggagcgcaggcgggcgcggagagattaaagtgcggagagaattacagccctctaagcaggtgagcggactgaccaatcacgctcgtactggacaggagaaacgaaacctgcagcggctggtgttagaaaccccttcacagaatatcttctttagtcctgtcagcgtcagtacgtctttagctatgttgtccctgggtgcccatagtgtgacaaaaacacaaatactccagggcctgggatttaacctaactcacacccccgaatccgcgatacaccaaggatttcagcacctggtgcattcactcaccgtaccgtccaaagatttgacactaaagatgggatctgcactgttcgttaaaaaggaactccagcttcaagccaattttttagggaacgtgaaaaggctttacgaggccgaagtgttcagcaccgatttttctaatccctctattgcccaggctcgtattaactctcacgtgaagaagaagacccaggggaaagtagtagacattatccaaggactggatctgcttaccgcgatggtactagtcaatcacatatttttcaaggcaaagtgggaaaagccctttcatccagaatatacaagaaagaatttcccctttctggtcggggaacaggtcacagtgcatgtgccaatgatgcaccagaaggaacaattcgctttcggggtggatacggaacttaactgcttcgtacttcaaatggactataaaggcgacgcggtcgcttttttcgtgctgcctagcaagggtaagatgagacagctggaacaggctctgagcgccaggacactcaggaaatggtcacactcactccagaaaagatggatagaagtctttatccccaggttcagcatttctgcttcatacaatctggagaccatcctgcctaaaatgggaatccaaaacgtgtttgacaaaaatgcagacttctctggaattgccaaaagagactctctccaagtgtccaaagtgagctag

SEQ ID NO: 15012 - RNA, 1065 nt, synthetic construct
  misc_feature 1..1065: note = source = /note="Description of Artificial Sequence: Synthetic coding sequence"
  source 1..1065: mol_type = other RNA
atggccccagcacgcagacccgcaggcgctcgactcctgttagtgtacgctggccttttggctgctgccgccgccggcttaggatcacccgaacccggagccccgtccagatcacgcgcacggcgggaaccaccccccgggaacgagctgcctagaggtcccggcgagagcagagcagggcccgcagctcgcccgcctgaacctacagccgaacgagcccatagcgtggatccaagagacgcatggatgctatttgtccgccagtctgataagggggtcaatggcaaaaaaagatccagaggcaaggcgaagaaactgaagttcggtctcccaggaccccctggtcctccggggcctcaaggacctcctggacctatcattccccccgaagctctgctgaaggagttccaactgctgctgaaaggagccgtccgacagagggaacgcgctgagcccgagccatgcacttgcggaccggctggaccagtggcggcttcactggctcccgtgagcgcaacagcaggtgaagatgacgatgacgtagttggagatgttcttgccttactggccgcccctctggcaccaggccctagggcacccagagttgaggccgcctttctgtgtcggctcagacgcgacgccctcgtggagcggagagccttgcacgagctgggggtatattatttgccagacgctgaaggggcttttcggagaggaccaggactgaacttaaccagtggacagtaccgtgccccagtagcaggattttatgctctcgccgctaccctccacgtggcactgggtgaaccaccacgaagaggaccccctcgacctcgcgatcacttgagactgcttatttgtatacagtctaggtgtcagaggaatgccagccttgaggccatcatgggtctcgaaagctccagcgagctctttaccatcagtgttaatggggtgttgtacttacagatgggccagtggacctcagtctttttagataatgcatctggttgtagcctcactgtccgctcaggatcccacttttcagccgtgctgttaggcgtctag

SEQ ID NO: 15013 - RNA, 2685 nt, synthetic construct
  misc_feature 1..2685: note = source = /note="Description of Artificial Sequence: Synthetic coding sequence"
  source 1..2685: mol_type = other RNA
atgagtctgccccgctgttgtccccatccgcttcgtcccgaaggcagtggtgcgatgggcccagaagctctctcatctttgctcctactcttgctcgtggcctctggcgatgccgatatgaagggacatttcgatccggctaaatgtcgatacgccctcggcatgcaagatagaaccatccccgactctgacatctctgctagttcatcctggtccgactccactgctgctcggcattccaggctggaatcctcagatggcgacggcgcatggtgtcccgccgggagtgtgtttcctaaagaggaagagtaccttcaggtcgatcttcagcggctccatctcgttgcattagtgggtactcagggcagacacgctggtgggctgggtaaggagtttagtcgaagctatcggctgagatattcacgtgatggacggcgatggatgggatggaaggacaggtgggggcaagaagtaatttctggcaatgaagaccccgaaggagttgtactcaaggacctagggccaccaatggtggctcggcttgtgcggttttaccccagagccgaccgcgtaatgagcgtgtgtctacgcgtagagttgtatggctgcctttggagagatgggctactgagctatacggcacctgtcggccagacaatgtatctatccgaggcagtctacctcaacgatagcacttatgatggtcacacagtgggaggcttgcaatacggcggactgggtcagctggcagatggtgtagtggggctggatgactttaggaagtcacaagagctaagagtgtggccagggtacgactacgttggttggagtaaccacagtttttcatctggatacgtggagatggagttcgaatttgatcgactgagagcattccaggcgatgcaagtacattgtaacaatatgcatactttaggagcccggttgcctggtggcgtggaatgtagattcagaagaggaccagccatggcgtgggagggcgagcctatgaggcacaatctcggcggcaacttgggtgatccaagggcaagagccgtaagtgttccgctcggcggtagagttgcccgctttctgcagtgtagattcctctttgccggaccttggctgttgtttagcgagatctccttcatttctgacgtagtgaacaactcatcccccgccttgggggggacgtttccacccgctccctggtggcccccaggacccccacccacaaactttagctctctggaactggagcccagagggcagcaacccgtcgctaaagcagaaggcagtcccactgcaatcctcatcggttgcttggtagctatcattctgttactgctcctcattatcgcgctgatgctatggcgtttacattggaggagactgctttcaaaggctgagcgtagagtcttggaagaagagttgactgtacatctgtccgttccgggagacacaatactgattaacaatcgccccggacctagggaacctccgccctatcaagaacctcgtcctcgcggaaacccgccacacagcgctccatgcgttcccaacggctctgcatactcaggagactacatggaacccgaaaaaccaggcgccccgctgctccccccacctccccaaaacagtgtgccacactatgccgaagcggatatcgtgactctgcagggggtcaccggtgggaacacatatgcggtccccgccctgcccccaggtgccgtcggcgacggccccccccgcgtagactttccacggtcacggcttagattcaaagaaaaactaggcgagggccagttcggagaggtgcacctgtgtgaggttgattccccccaggaccttgtctcgttggactttccactcaacgtcagaaaaggacatcccttgctcgtcgcggttaagatcctccgtccagacgccaccaagaatgcccgcaacgactttttgaaggaagtgaagatcatgtctaggttgaaagatccaaacatcataagactgctgggagtgtgcgtccaagacgaccctctgtgtatgataactgattacatggagaacggtgacttaaatcagtttttatccgcccatcaattagaagataaagcagctgaaggcgctcctggtgacggacaggcagcccaaggacctaccattagctatccaatgcttctacacgtggcagctcaaatcgcatcaggcatgcgatatctggccacactgaacttcgtccatagagacctcgccacaaggaactgcctcgtgggggagaacttcacaattaagattgccgactttgggatgtctaggaatctgtatgctggtgactactatagggttcagggtagggctgtgctaccaatccgctggatggcctgggagtgtatcctcatgggtaagttcactactgcctccgacgtgtgggctttcggcgttaccttatgggaggtgctgatgctttgtcgcgctcagcctttcggacagctcacagacgaacaggtaatagaaaatgctggcgaattttttcgcgaccaaggccgccaggtctacctctccagaccccctgcttgtccacaaggcctctacgaattgatgctgcgatgttggagtcgggaatccgagcagcgcccgcccttctcccagctccatagattcctggcagaagacgcgttgaacactgtctag

SEQ ID NO: 15014 - RNA, 2685 nt, synthetic construct
  misc_feature 1..2685: note = source = /note="Description of Artificial Sequence: Synthetic coding sequence"
  source 1..2685: mol_type = other RNA
atgtccctgccccgatgttgcccgcatccgttgcgtcctgaaggaagtggcgcaatggggcctgaagcacttagctccctccttttacttctcctcgtagcttctggcgatgccgacatgaagggtcacttcgatccagcaaaatgccgttacgctttgggcatgcaggataggacaatccctgattcggatattagcgcttcaagttcttggtccgatagcacagctgcaagacacagcagactcgagtcgagcgatggtgatggagcctggtgtcccgccggaagtgttttcccaaaagaagaagagtacctccaggtggacttgcaaagactgcatttggtggctctcgtgggtactcaggggagacatgcaggcggattgggcaaggagttctccagaagctatagacttagatactcccgggatgggagaagatggatgggttggaaggacagatggggccaggaagtgataagcggtaacgaggaccccgagggagttgtcttgaaggatctggggcccccaatggtcgcccgcctggtgcgtttttatccacgagctgatcgagttatgtcagtgtgtctgagagtcgaactctatggctgtttatggagggacggattgctctcatatactgcaccagtaggccagaccatgtacctcagtgaggcagtgtatttgaatgactcaacttacgacggacatacagtggggggattgcaatacggaggactagggcaattagcggacggggtcgtagggctggacgacttccggaagagtcaggagttacgagtgtggcccggatacgactacgttggatggagcaaccactccttcagcagtggatatgtggaaatggagttcgagttcgacaggctgagagcttttcaggccatgcaggtccactgtaacaatatgcatactctgggggctaggctcccaggtggagtcgagtgcagattcagaagaggtccagcaatggcctgggagggagagccaatgcgccacaacctgggtggaaacctcggagatcctagggcacgcgctgtgtctgtccccctaggaggtcgagttgcgcgttttctgcagtgtcggttcctgttcgccggaccctggctgctgttttctgaaattagctttatatctgacgtggtaaacaactcttcgcccgcactaggaggcacatttccacctgcgccttggtggccgcccggtcctccccctacgaattttagtagtctggagttggagccaaggggccagcaaccggttgctaaagctgaaggctctccaaccgccatcctgataggatgcctagttgcaattatattacttctgttgttgataattgccctcatgctgtggagactgcactggagacgtttactgagcaaagccgagcggagagttttagaggaagagctgaccgtgcatttatcagtgccaggtgacacaatcttaatcaataatcgccctggcccccgcgaacctccaccataccaggaacctaggccaagaggcaaccctccgcattctgcaccctgcgtgccaaacggatccgcctactccggtgactatatggaaccagagaagcctggtgcccctctcctgcctcctcctcctcagaattcagtaccccactacgcagaagccgatatagtgaccctacagggtgtgacaggagggaatacctatgctgttccagctcttccacctggcgctgttggagacggcccgcccagggtagatttcccccggagcaggttaagattcaaagagaaactcggtgaagggcaattcggcgaggtgcatctgtgtgaagtcgactccccacaagatctggttagtcttgattttccgctgaatgttcgtaaggggcacccactattagtggctgtgaagatcctgcgtcccgacgcaacaaaaaacgcaaggaacgattttttgaaggaggtcaaaatcatgtccagactcaaagacccaaatatcatacgcctgttaggagtttgtgtgcaagacgaccctctctgtatgattacagattatatggaaaatggcgacctgaaccagtttttgtcagctcaccagcttgaagacaaagccgctgagggtgccccaggcgatggacaggctgcccaaggacccaccatatcctatcccatgctgctgcatgtggcggcccagattgccagcggtatgcgatacttggctacacttaatttcgtccatagggacctcgctacaaggaattgtctggttggagaaaatttcacgattaaaattgcagatttcggaatgagtcggaatctctacgctggtgactattatagagttcaaggacgagctgtgctccctatacggtggatggcatgggagtgtattctaatgggcaaatttacaactgcctccgacgtgtgggcatttggggttactctatgggaagtgctcatgttgtgtcgtgctcagcctttcggacagctgacggatgagcaggttatcgagaatgcgggtgagtttttcagagaccagggaagacaagtatatctgtcacgtccacccgcctgcccacaaggactgtacgagcttatgctgcgctgctggtctcgtgaatcggaacagcggcccccgttctcccaattgcatagattccttgctgaagatgcactgaataccgtgtag

SEQ ID NO: 15015 - RNA, 2886 nt, synthetic construct
  misc_feature 1..2886: note = source = /note="Description of Artificial Sequence: Synthetic coding sequence"
  source 1..2886: mol_type = other RNA
atgcttttgctcttactgctggctccactgtttcttcgaccaccgggagctggtggtgctcagactcccaacgccacttctgaaggctgtcagatcattcatccaccgtgggaaggcgggataaggtaccgtggtttaactcgggatcaggtgaaggccataaactttctcccagtggactatgagatcgagtatgtgtgtaggggcgaacgagaagtcgtgggaccaaaggttcggaaatgtctggcaaatggaagctggactgacatggacacacctagccgatgtgtgaggatttgttcaaagtcttacttaacgctcgaaaatggcaaagtctttcttaccggtggggacctccctgcactcgatggcgctcgcgtcgacttcaggtgtgatccagactttcatctggttggaagtagccggtccatatgctcgcagggtcagtggagcactcccaagcctcattgccaggtcaacaggactccccattcagagcgccgagccgtttatattggcgcgttgttccctatgtctggtggatggcccggtggacaggcgtgtcagcccgctgttgagatggcccttgaggacgttaactctcggcgtgacatacttcccgactacgagctgaagcttatccaccacgacagcaagtgcgaccctggccaagcgaccaagtatctttatgaattgctgtacaacgatccgattaaaattatcctaatgccaggatgctcttctgtgagtacattggtggccgaagctgcccgtatgtggaacttgatcgtgctctcctacgggtctagtagccctgccttaagtaacagacagcgctttccaactttctttaggacccatccttcagccaccttgcataatcccaccagagtgaaactctttgagaagtggggctggaagaaaatcgctactatacagcagactacggaggtcttcaccagtacccttgacgaccttgaagagcgagtgaaggaagcggggattgagattacctttagacagtcgtttttttcagacccagctgtgcccgttaaaaatcttaaacgccaagatgcacgaattatagtcggcttattctatgaaactgaggcaaggaaagtgttttgcgaggtctacaaggaaagactgtttggaaaaaagtatgtttggttcttaatcgggtggtacgctgacaattggtttaagatttacgatccttcgatcaactgcacagtggacgaaatgactgaggctgttgagggacatattactacagagattgtgatgcttaatcctgcaaatactaggagtatttccaacatgacttcccaggaattcgtggaaaagctcacaaaacgactaaaacgccacccagaagaaacgggaggattccaggaagcacctctggcctacgatgctatctgggctctcgcccttgcactcaacaaaacttcaggaggaggcggtagatccggggtgagactcgaagactttaactataacaaccaaaccatcaccgaccagatatacagggccatgaatagttccagcttcgagggcgtgagtggacacgttgtgtttgacgcttcaggttcccggatggcttggaccttaattgaacagctccaaggtgggtcatacaagaaaattgggtattatgattctaccaaggacgatcttagctggtccaaaacagacaaatggattggtggaagcccccccgcagatcaaaccctggtcatcaagaccttcaggttcctgagtcaaaagctcttcattagtgtgagtgtgctgtcctctcttggtatcgtcctcgctgtagtttgtctttcctttaatatctataattcgcacgttcggtatatacaaaactcccagccaaatttgaataacctgactgccgttggttgctccctcgctctggcagccgtattccctctcggcctcgacggctaccacattggacgcaatcagtttccgttcgtttgccaagcccggttgtggttgcttggactcgggtttagccttggctatggttccatgttcaccaagatttggtgggtccataccgtattcacaaagaaggaagagaagaaagaatggagaaaaactctggaaccatggaagctttacgcaacagtgggcttgcttgtggggatggacgtgctgaccttggcgatttggcagatcgtggaccctcttcatcggaccattgaaaccttcgcaaaagaggagcctaaggaagatatcgacgtgtccattttgccccagctcgaacactgttcaagccgaaaaatgaatacatggctgggaattttctatggctataaagggctccttctactgctcggcatcttcttagcatatgaaactaaatctgtcagcaccgaaaaaatcaatgatcacagggccgtcggaatggcaatttacaacgttgcagtactatgcttaatcaccgccccggttaccatgattctgtcttctcaacaggacgctgcgtttgcatttgcttccctggccatagtgttcagttcctatattacactcgtcgtactgttcgtgcccaaaatgcgccggctcatcacccgcggggaatggcagagcgaggcccaggatactatgaagacgggtagctccactaacaataatgaggaagaaaagagtagactgctggaaaaggaaaatcgggagcttgaaaagatcatcgccgagaaagaggagagagtatcagaactacgtcaccaactgcagagtaggcagcagttaagatcccgacgccaccccccaacaccaccagaaccttccggcggtctcccacgtggccccccagaacccccagatcgcctctcctgcgacggctcacgggtgcatttgctgtataaatag

SEQ ID NO: 15016 - RNA, 2559 nt, synthetic construct
  misc_feature 1..2559: note = source = /note="Description of Artificial Sequence: Synthetic coding sequence"
  source 1..2559: mol_type = other RNA
atgctgccaacagaagtaccccaatctcaccccggaccatctgccttgctcttgcttcagctgcttcttcccccaacttctgctttctttcctaatatctggtccctgcttgcagcccccggaagcatcacccaccaagacctcactgaggaagcagcacttaacgtgacgttacagttgtttcttgaacagcctcccccaggcaggccacccctgcgactggaagactttctgggccggacccttctcgcagatgacctgtttgccgcttatttcggccccggttccagcagacgattcagagcagctttaggcgaggtgtctcgggccaacgctgcacaggacttccttccaacatccaggaacgaccccgatttgcatttcgatgccgaacgcctcgggcaagggagagctagacttgtcggtgccctgagagagacagtggttgccgctagggcccttgaccataccctcgctcggcagcgcttgggcgccgcactgcatgcactccaagacttctactctcactctaactgggtcgagttaggggaacagcaaccccaccctcatctgttgtggccacgccaggagttacaaaatttagctcaggtggccgatcctacatgtagcgattgcgaggagctgtcctgccctagaaactggcttggcttcaccctcctaacctccgggtatttcggcacccacccccccaaacccccaggcaaatgttctcatggtgggcacttcgatcggagttcatcccagcctcccaggggcggcataaataaagactctacttcgcccggcttttcaccgcaccacatgttacatctgcaggcagcaaaattggcattgttagcaagcatacaggctttttctctacttaggtcccgactgggggacagggattttagtagattactcgacatcacgcctgcctcttccctcagttttgtccttgatacgactggaagcatgggcgaagaaatcaacgcggccaaaattcaagccagacatctcgttgaacagcggcgcgggtcccccatggaaccggtgcactatgtcctcgtgccgtttcacgaccccgggtttggcccagtgtttactaccagcgaccccgattccttttggcagcaattaaatgagatacatgcattgggaggcggcgatgagccagaaatgtgcctatcagctctacaacttgctctcctccacaccccccccctcagcgacatctttgtttttacagacgcctctccaaaagacgcgttcctgaccaaccaagtcgaatcccttacccaagaaagacgctgtcgagttaccttcctcgtgaccgaggacaccagccgtgttcaaggaagagcccgccgcgaaatcctgtccccactcaggtttgagccctataaggcggtggcactcgcaagcggtggggaggtgatttttacaaaggatcaacacattagggatgttgctgccattgtaggcgagtctatggccgcactcgttactctcccgttggatcctccagtagtcgtaccaggtcagcctctcgttttcagtgtggacgggctgctgcaaaaaatcacggtgcgaatccatggagatatcagcagcttttggatcaaaaatcctgcaggcgtgtcacaagggcaggaagaagggggtggacctctcggacatacacgccggttcgggcaattttggatggtgacaatggacgaccccccccagactgggacatgggaaattcaggtcactgcagaagatacacccggcgttcgcgtacaagcccaaacatctctggatttcctcttccacttcggaatccctatggaggatggcccacaccccggactatatcccttaactcagcccgtggcaggacttcagactcagctcctcgtggaggtaactgggctcgggtcacgcgcgaaccccggtgacccacaacctcacttttctcacgtaatcctgcgtggagtccccgaaggagccgagctcggccaggtgcccttagagccagtgggacctcctgagcgcggactccttgcagcctcactgtcccctaccctgttaagtacccctcgacctttctcactggagttgatcggccaggatgctgccggtaggcgactccaccgcgctgctcctcaaccatctacggtcgtccctgtcttacttgagctgtcaggaccctctggttttctcgcccccgggagcaaggtccctttaagtctgaggattgccagtttctccggtccacaagatctcgatctcagaaccttcgtcaacccatccttctctcttacatccaacctcagcagagcacatttggaattgaatgagagtgcgtggggcagactttggcttgaagtgcctgattcggctgcgccggatagcgtagtcatggttacggtgacagctggaggaagagaagctaatcccgtcccacctacccatgcatttttgagattactcgtgagcgcccctgctcctcaagttcgcaaccactactttccatctcagggtcccgcccaccacccatacaggctcatttag

SEQ ID NO: 15017 - RNA, 756 nt, synthetic construct
  misc_feature 1..756: note = source = /note="Description of Artificial Sequence: Synthetic coding sequence"
  source 1..756: mol_type = other RNA
atgccccatctagcctctctcttcactgcttcgtccaggtgttgcccccatcccttgcgacctgaaggatctggggctatggggcctgaggccctttcatcattgctgctgctccttctggttgcctctggagatgctgatatgaagggacatttcgaccctgcaaaatgtagatatgcactgggaatgcaagacaggaccatacccgatagcgacatctccgcctcctcaagttggtcagattcgaccgccgccagacattcacgactcgagtcaagcgacggagacggcgcttggtgcccagcgggctcagtgttccctaaagaggaggagtatttacaggtggacctacaacgtttacatctggtcgccctcgtgggcactcagggccgacacgctggcggcttgggtaaagagttctcacggtcataccggttgagatattccagggatggcaggcgttggatgggatggaaagatagatgggggcaggaagtgatctcgggtaatgaagatcctgaaggagtggttttaaaagatttaggcccaccaatggtcgcaaggttggtgaggttttacccacgggctgatcgggtgatgagcgtctgtttgagagtggaactgtatggctgtctgtggcggggagaatggctgtcatttctaggaatttgcttcctgtccagaggacttgagggcggagagtgtggagagtgggcctctcggatacccagtccggcagggaaactaagtctgtag

SEQ ID NO: 15018 - RNA, 726 nt, synthetic construct
  misc_feature 1..726: note = source = /note="Description of Artificial Sequence: Synthetic coding sequence"
  source 1..726: mol_type = other RNA
atgaaattcatcctgctctgggcacttttaaatttgacggtggccttggcattcaatcccgattatacagtctcctctacgccaccctaccttgtttatctcaaatctgattaccttccctgtgccggcgtattgattcatccactgtgggtgattactgcagcccattgcaatcttccgaagctgcgcgttattctgggtgtaaccatacctgccgacagtaatgagaaacatctccaagtgataggatatgaaaagatgatacatcaccctcatttttccgtgaccagtattgaccacgacattatgctaatcaaactgaagaccgaagcagaattgaacgactacgtgaaactggccaatctcccctaccagactatttcagaaaacactatgtgtagcgtgtccacctggtcttacaacgtttgtgatatctataaggaaccagacagtctccaaacagtgaatatcagtgtcattagcaagccccaatgtagggatgcttacaaaacttacaacatcacggaaaatatgttatgtgtcggaatcgtgccgggcaggcggcagccatgtaaagaggtatcagcagcaccggctatctgcaatggcatgctacaaggcatcctctcatttgccgacggttgcgttctaagagcagacgtaggaatttacgcaaaaattttttattacatcccctggattgaaaacgttatacagaataactag

SEQ ID NO: 15019 - RNA, 1536 nt, synthetic construct
  misc_feature 1..1536: note = source = /note="Description of Artificial Sequence: Synthetic coding sequence"
  source 1..1536: mol_type = other RNA
atggccaagggactctcggtacagaacgataagcaccccggttaccagccagcactgctactttcacctggagcccctctgtttgccgacggaccagcttatgccctgttacatttattgctgcacgaggggaaagctgaaatggcagatcaagccgccgcctggctgactcggcagggttccttccaagggggcttccggtcaactcaggatacagtgattgccttggacgcattaagcgcttactggatcgcttcccacaccaccgaggaaagagggttaaacgtgaccctgagtagtaccggccgcaatggtttcaaaagtcatgcactgcagctgaacaatcgacaaatccgaggtcttgaagaggagctgcagttcagccttgggagcaaaatcaatgtaaaagtcggagggaatagtaagggcacactcaaagtgctgcggacttacaatgttctggatatgaaaaatactacctgccaagatctacagatagaagtaacagtgaaaggacacgttgagtacacaatggaggcgaatgaagattacgaggactacgaatacgacgagctgcccgccaaggacgatcccgacgctcctctgcaacccgtgactccattgcagctgtttgagggcagaaggaacagacgcaggagggaagcaccaaaggtcgtcgaagaacaggagagccgagtacattataccgtttgtatatggagaaacgggaaagtgggtctgtctggcatggctatcgcagatgtgacgctactgtccggctttcacgctctgagagcagatcttgaaaagcttaccagcctttccgacaggtatgtttcccatttcgagactgaaggccctcacgtcttattgtactttgacagcgtgccaacatcaagagagtgcgttggattcgaagcagtccaggaggtcccagtagggctcgtccagcccgcctccgctacactatatgactattacaaccccgaacgcagatgttccgtcttttacggcgctccaagcaaaagtcgcctattagccaccctgtgttccgccgaagtttgccaatgtgcagagggcaaatgtcccagacagagacgcgccctggaacggggtctgcaggacgaagacggttatcgtatgaagttcgcgtgttactacccacgcgttgagtacggattccaggtcaaggtgctacgcgaggactctagagccgccttccgcctcttcgagacaaagattacccaagtactccattttacaaaagatgtaaaggccgcagccaatcagatgcgaaattttctggtccgtgcctcttgtcggttaagacttgaacctggaaaggagtatcttatcatgggcctcgatggcgcaacttacgacctggaaggacatccacaatatttactagattctaacagttggatagaagagatgccatccgaaaggctctgccggtccacacgccagcgggcagcttgcgcacagctaaatgattttcttcaagaatacggaactcagggctgccaagtatag

SEQ ID NO: 15020 - RNA, 2067 nt, synthetic construct
  misc_feature 1..2067: note = source = /note="Description of Artificial Sequence: Synthetic coding sequence"
  source 1..2067: mol_type = other RNA
atgcttcccaccgaagtcccgcagtcccatcccggtccctctgcattgctgttattgcaacttctccttccacctacttccgccttcttcccaaacatttggagcctattggcagccccaggatccatcacacaccaggacctcaccgaggaggccgctctcaatgttacccttcaactgttcctcgaacaaccgccacctggccgcccccctttgcggttggaagatttcctcggacggacactcctggcggacgaccttttcgcagcttactttggaccaggctcaagccgacggttcagagccgctctaggagaagtgagtcgagctaatgcagcccaggatttcctgcctacttctaggaatgacccagatctacattttgatgccgaacgcttaggccagggcagagccagacttgtcggcgccttgcgtgaaacggtggtggccgcccgcgcactcgaccatacccttgcacggcaacgactaggagccgcacttcacgccctgcaggacttctacagtcactctaactgggtagaactgggcgagcagcagcctcacccacacttgctgtggcccaggcaggaactacagaatctggcacaggtcgcagacccaacctgctccgattgcgaggaattaagttgcccgcgcaactggttagggttcacattgctgacatccggatacttcggcacccatcccccaaaacctcccgggaaatgtagccacggcggccatttcgaccgttcatcatcccaacctccccgcggcggcatcaataaggactcaacttcaccaggattttccccacatcatatgttacacttgcaagccgccaaattagcactgctcgctagcatccaggccttctccctgctgagatcacggctcggggatcgggatttttcaagactactggatattacacccgcaagttctctgtcattcgtactggacaccactggctctatgggggaggaaatcaacgcagcgaaaatacaggcgcgccacttggttgagcagagaaggggctcacctatggagcccgtacattacgttttagtgccttttcatgaccctggattcggcccagtcttcacaacaagcgacccggactctttttggcagcaattgaacgaaatacatgctctcggaggtggggacgagcccgaaatgtgtctgtccgcacttcagctggcccttctccatactccacctctatccgacatctttgttttcaccgacgcctctcccaaagatgcttttctgacgaatcaggtcgagagtctaacccaagaaagacggtgcagggtcacttttttggtgaccgaagatacatctcgcgtgcaaggtcgggccaggcgagaaatcctgtctccccttagatttgaaccctacaaagccgtggcattggcaagcgggggcgaagttatttttaccaaggatcaacacattcgggacgttgctgcgattgtcggtgagtcaatggcagccctggtgaccctcccattagatcctccagtggttgtacccgggcagcctcttgtttttagcgtcgatggcttgcttcagaaaatcacggtgagaatacatggagatatttcaagcttttggatcaaaaacccagcaggcgtttctcaaggccaggaggaggggggaggtcctctaggtcacacacgtcgttttggccagttttggatggtaactatggacgacccaccgcagaccggcacgtgggaaattcaggtaacagcagaagacacccctggagtgagggtgcaggctcagacttccctggacttcctgtttcactttggtatacctatggaggatggtccccaccctgggttgtacccccttacgcagccagtggccggcctccagacccagctcctggtagagtctcagtcttggggatcttccgcagcgtttttacctcggcaccctagtaggggaccccgcggatgtcgcacgaggcccggcgccttgggtgcaagaggaacatcaggggctagatcaccccggtccctagccgtcgctcatgcagccgtgcacccttag

SEQ ID NO: 15021 - RNA, 2559 nt, synthetic construct
  misc_feature 1..2559: note = source = /note="Description of Artificial Sequence: Synthetic coding sequence"
  source 1..2559: mol_type = other RNA
atgctgcctacagaagtcccacagtcacacccaggaccttctgctctacttttgcttcagttactcctcccacccacatccgcctttttccccaatatttggtccctgctagcagcccccggatcaatcacacaccaggacctcactgaggaggcagcccttaatgttacactgcaattgttcttagagcaaccaccgcccgggagaccgcctttacggctcgaagacttcctgggccgcacgctactagctgatgaccttttcgctgcatacttcggaccaggcagttcaagacggttcagggcagccctaggagaggtgagtcgggcaaacgcggcccaagactttctgcccacttcaagaaatgatcccgaccttcacttcgacgcggagaggctcggtcagggtagagcaagactcgtaggagcactcagagagacagttgtagccgcacgtgctctggaccacacactggctagacaacgactgggtgcggccttgcacgctctgcaggatttttatagccactcgaactgggtcgagctcggtgagcaacagccccatccccatctgttatggccgcgacaggagctgcaaaacctagcccaagttgcggaccccacgtgtagcgactgtgaagaactgtcctgtcctcgaaactggttaggattcacactgcttacgagcggctatttcggcacccatccccccaaacccccaggaaaatgctcccacggtgggcacttcgataggtcaagcagccagcctccacgtggtgggatcaacaaggatagcacttctcccggcttcagtccacatcatatgctccatttacaggcagccaaacttgccctcctggcctctattcaagcgttctccctgctgaggagcagactcggtgacagggactttagccggctactggacattaccccagcctcctccctcagtttcgttttggatactacaggctcaatgggcgaagagattaacgccgcgaagattcaagcccgccacctggttgaacaacgcagaggcagtccgatggagcctgtgcattacgttcttgtcccattccacgacccaggcttcggtcctgtttttactacctccgaccctgactccttctggcaacagctgaacgaaatacacgccctcggggggggtgatgaacctgagatgtgcctctccgccttacaactggcactactgcatacaccccccctttcagatattttcgtgttcactgacgccagcccaaaggatgccttcttgaccaatcaggtagagagtttgacccaggagaggagatgtcgggtgacgttcctggtgaccgaggatacttccagagtccaaggacgcgcccgcagggagatactgtcaccgctaagattcgaaccttacaaggctgtagccctggcaagtggaggagaggtgatatttactaaagaccagcatattagagatgtggctgccatcgtaggtgagtctatggccgccctggttacactgcccctcgaccccccagttgtggtgcccggacaacctctagttttttcagtcgatggcctgcttcagaagattaccgtacgcatccatggtgatatcagctccttctggataaaaaaccccgccggggttagccagggccaggaagagggaggaggccctctcggacatactagaagatttggccagttctggatggtcactatggatgaccccccacagaccggaacctgggagatccaggttacagcagaagacacacccggcgtccgagtgcaggcccaaacctcattggattttctctttcacttcgggattcccatggaagatggaccccacccaggactgtaccctctgacccaaccagtagccggccttcagactcaactgttggtggaggtgaccggcctcggcagcagagccaaccccggagacccccaaccgcattttagccatgttatcttgagaggggttcccgagggagctgaactgggccaggtccctttagagcccgttggaccccctgaacgaggattgctggctgccagcctctccccaaccctactctccacccccaggcctttttctcttgagctcattggacaagatgccgccggaagaagactgcatcgcgcggctcctcaaccctccacagtagtgccagttctgttagaactctcaggcccatcaggctttctagcccccggttccaaagtgcctttatcattacgcattgcatccttttcaggacctcaggacttagacctgagaacctttgtcaatccgtctttctccctcaccagcaacttgagccgtgcacacttggagctgaatgaatcagcatggggacggctgtggctagaggtgcccgattctgccgcccccgactccgttgtgatggtcaccgtgactgccggcggaagggaagccaatccagtgccccccacccacgcgttcctgcgcttgcttgtttctgccccagctccccaagttcgtaaccactatttccccagccagggccctgcacatcatccatataggctgatctag

SEQ ID NO: 15022 - RNA, 1737 nt, synthetic construct
  misc_feature 1..1737: note = source = /note="Description of Artificial Sequence: Synthetic coding sequence"
  source 1..1737: mol_type = other RNA
atgctgttgcttttactgttagccccccttttcctcaggcctccaggcgctgggggagctcagactccaaatgcaacatccgaagggtgccagattatacacccgccatgggaaggcggaatcaggtacagaggactgacgagagaccaggtgaaagctataaattttctgcccgtggattacgagattgaatacgtgtgcagaggagaacgtgaagtggtgggccccaaagtgagaaagtgcctagcgaacggctcttggacagatatggataccccctcaaggtgcgtgcggatttgctctaaaagctacctaactctggagaacggcaaggtatttctgacgggcggggatcttccggcactcgatggtgctcgcgtggatttccgctgtgaccccgactttcatcttgtcggcagctctagaagcatttgctcccagggacaatggtccacccctaagccccactgccaggtcaataggactcctcattccgagcgtagagcagtttatattggcgccctttttccaatgagtggtggatggcccggcggccaggcttgtcagccagctgtagagatggccttagaggatgtgaattcgagaagagatatcctgccagactacgagttgaaattgatacatcatgattccaagtgcgacccaggacaggcaacgaagtatttgtatgagctgctgtacaatgatcctattaaaattattctcatgccaggatgttcatctgtgtccactttagttgctgaagcggcaagaatgtggaatctgatcgtattgtcctacggcagttctagccccgcccttagcaaccgccagcgttttccaactttctttcggactcacccaagcgcaacactacataatcccaccagagttaaactgtttgaaaaatggggttggaaaaagatcgctacaattcaacagacaactgaagtgttcactagcacactcgatgatctggaagagagagtaaaagaggctggtatcgaaatcaccttccgccagtccttcttctcggatcccgctgtccctgtgaagaatctgaaaaggcaggacgctcgcattatagtcggactgttctacgaaactgaagccagaaaagtgttctgcgaggtttacaaagaacgactgttcggtaagaaatacgtttggttcctgattggttggtacgccgacaactggttcaaaatatacgacccatcaatcaattgtaccgtggatgagatgaccgaggcagtcgaaggacacattacaactgaaatcgtcatgctgaaccctgcaaacacccgaagtatttcaaacatgactagtcaggagttcgttgagaagcttaccaagagactgaagagacacccagaagagactggcggtttccaggaagctcccctagcatatgacgcgatctgggcacttgctctggccctcaataagaccagcggaggcggtggaagaagtggcgttcggttggaggattttaattacaataatcaaactatcaccgaccaaatctatagagccatgaattcatcatctttcgagggcgtttctggccacgtggttttcgacgcatctggaagcaggatggcatggacattaattgaacaactccaggggggttcctacaagaaaattggttactacgattctacaaaagatgatctaagctggtctaaaaccgataagtggatagtcatttctcgcactcattccccaacgtag

SEQ ID NO: 15023 - RNA, 1326 nt, synthetic construct
  misc_feature 1..1326: note = source = /note="Description of Artificial Sequence: Synthetic coding sequence"
  source 1..1326: mol_type = other RNA
atggaattcgaattcgatcgactgagagcttttcaggcaatgcaagtccattgcaacaacatgcatacacttggagcacgactgccaggaggcgtcgaatgtcgttttaggagaggccccgcaatggcctgggaaggcgagcccatgcggcataatttgggcggcaatctgggggacccaagggcacgagcagtgtcagtccctctgggcggtcgagtggctcggttcctgcaatgtcgcttcctgttcgcaggcccgtggctgctgttcagcgaaatctccttcatttctgatgtggtaaataattcctctccagcccttggaggcactttccccccagccccgtggtggcccccaggtcccccccctaccaatttctcatcactggaactcgaaccacgcggccaacaacctgtggccaaagccgaggggagtcccaccgctatactcataggctgtttggtggcaatcattctgttgctcctgctgatcattgccctcatgttgtggaggttgcattggagacgcctgctgagcaaagtgctcgagtcccatccacgcaccaggtcacctggcctagtaggcatcagacccacacccttgcccgtgagtccgatggcactccgatgctgtagccccattcaacccaccgcctccttctggccattaaccccagtcccgcttgaggcgcgcgcgccgccgcacccccccggacccaacccccccacaccgaggggtgtcactgggggaaatacatacgctgtgcctgctctgccccccggcgctgttggagacggacccccaagagtggattttccaagatcaagactgcgattcaaggagaagctcggtgaaggccagtttggcgaagtacatttgtgtgaagtggatagccctcaagacctggtatccttagactttccacttaatgtgagaaaaggacaccccctcctcgtcgctgtgaaaatattgaggccagacgcaactaagaacgcacggaatgatttcctgaaggaagtgaaaattatgagtcgactgaaagatccgaatattattagactcctcggcgtgtgcgtacaggatgaccctctttgcatgattactgactatatggaaaatggagacttaaatcaattcctcagcgcccaccagctcgaagacaaggcggcggagggtgccccaggggacgggcaggctgcgcagggaccaaccatatcttatccaatgctactccatgtcgccgcccaaatagcctccggaatgcggtacctcgcaactctgaatttcgtgcacttttggggcgaaaggcaccgctttctgcattag

SEQ ID NO: 15024 - RNA, 2685 nt, synthetic construct
  misc_feature 1..2685: note = source = /note="Description of Artificial Sequence: Synthetic coding sequence"
  source 1..2685: mol_type = other RNA
atgtctctccccagatgttgcccccaccccctgaggccagagggctccggagccatgggacctgaagccctttcgtcgctgctgctgcttctccttgtggccagtggagacgccgatatgaaagggcacttcgatcctgctaaatgccgttacgcactgggcatgcaagacagaacgatccccgactcggacatctctgcatcgtctagttggtctgattcaacagctgctagacactcacgcctggaatcttccgatggcgatggcgcttggtgcccagctggaagcgtttttccaaaggaagaggagtatttacaggtcgaccttcagcgcctgcacctcgttgcgctggtcggtacgcagggtagacacgctgggggacttggtaaagaatttagccgctcttacagactaagatattcacgggatggcaggcggtggatggggtggaaagatcgctggggacaggaagtgatttccggtaacgaagatcctgaaggcgttgtgctgaaagatttagggccccccatggtcgcgagactcgtaaggttctatccccgcgctgaccgggttatgagcgtttgcctgcgagtggagttgtatggatgcctttggagggatgggctgctgtcttacaccgcacccgtgggtcagaccatgtatttatctgaagcggtgtatctgaatgactccacatacgacggtcatactgtgggtggcttgcagtacgggggactcggacaactcgcggatggggtggtcggattggacgattttcgaaaatcccaagaacttagagtctggcctggctacgattacgtgggatggtccaatcactctttctcatcggggtatgtcgagatggaattcgaatttgaccggcttcgcgctttccaagccatgcaggtgcattgtaataatatgcacacactaggggcccggctgccaggtggagtggagtgtaggtttcggcggggtccagctatggcatgggagggagagcccatgaggcacaacttgggtggcaatctgggcgatccaagagcacgcgcagtgtcagttccactcggcggcagagtagcgcgttttctgcagtgtaggttcctcttcgccgggccctggctgttgttttctgaaatctctttcatatcagatgttgttaacaattcctcccctgctctaggaggcactttcccgcccgctccttggtggccacccggtcccccccctaccaacttctcttcacttgagctagagccacgcggacagcaaccagtcgctaaagcagaaggaagccccaccgctatactcattggctgcttggttgctataatacttctgctcctcctcattatagcgctgatgttgtggcggctgcactggcggaggctgctgagcaaggctgaacgacgggttctggaagaggaactcactgtgcatcttagtgtccccggcgatactatactaataaataataggccaggccctcgcgagccaccaccgtatcaggagccccgcccaagaggtaatccgccacattccgccccctgtgtgcctaacgggtcggcctactcgggtgactatatggaaccagagaagccaggagctcccttactgcccccacccccgcagaactcagtgccacactatgccgaagcagacatcgtaacactccagggcgtgacaggcggcaacacctatgccgttcctgccctccccccgggcgcagtcggtgatggccccccacgggttgatttcccaaggagcagattgagatttaaggaaaaactgggagagggccaattcggggaagtgcatctgtgtgaggtcgacagcccccaggaccttgtcagtttggattttcctctgaatgtgaggaagggccatcccctccttgtcgctgtcaaaattttgagaccagatgccaccaaaaacgccagaaacgacttccttaaagaagtgaagattatgtcccggttaaaggatcccaatatcattagactactcggcgtttgcgtgcaggacgatccattgtgtatgattaccgactacatggaaaatggtgatctgaaccagttcctcagcgcacatcagttagaggacaaggctgctgagggagccccaggagacgggcaggcggcacaggggccaacaatcagctatcctatgttactgcacgtcgcagcacaaatcgcatcagggatgagatatttggccactctgaactttgtccatagggatcttgcaacccgtaattgcctcgtgggcgagaactttaccataaaaatcgccgactttggaatgtcacggaatctatatgctggagattattaccgagtacagggtcgggcagtcttgccgattcggtggatggcctgggaatgcattcttatgggtaaattcacaactgcctccgacgtctgggcttttggagtgacactctgggaggtgttgatgttatgtcgcgcccaaccctttggccaattgacagatgagcaggttattgaaaatgcaggcgaattcttcagagatcagggaagacaggtgtacctctcaagaccgccggcgtgcccccaaggcctctacgagcttatgctgagatgctggtccagggaatcagagcaacggccccctttctcgcagcttcacaggttcttagcggaggatgctctgaacaccgtatag

SEQ ID NO: 15025 - RNA, 216 nt, synthetic construct; identical to SEQ ID NO: 13386
  misc_feature 1..216: note = source = /note="Description of Artificial Sequence: Synthetic coding sequence"
  source 1..216: mol_type = other RNA

SEQ ID NO: 15026 - RNA, 2760 nt, synthetic construct
  misc_feature 1..2760: note = source = /note="Description of Artificial Sequence: Synthetic coding sequence"
  source 1..2760: mol_type = other RNA
atgggtccggaagccctgagcagtcttctcttactacttctcgtcgctagcggtgatgccgatatgaagggacatttcgatcctgccaagtgcagatacgcccttggtatgcaagacagaacaataccagattccgacatctcagcctcatcaagctggtctgatagtacagcggccagacactctcgactggagagcagcgatggcgacggggcctggtgccctgcggggtcagttttcccaaaagaagaagagtatctccaggtagatttgcagcgcctgcaccttgtggcactggtaggaacccaaggacgacatgctggaggactgggcaaggaatttagcagaagctaccggctgaggtatagtagagacggccgacggtggatgggctggaaagacaggtgggggcaggaggttattagcggaaacgaggaccctgaaggagtcgtcttaaaggacttggggccccccatggtagctcggcttgttagattttatcctagagccgatcgtgtgatgtcagtctgcctgagagtggagctctacggatgtttatggcgggacggattgttaagctatacagctcctgtgggccagacaatgtacctctccgaagccgtctatctcaacgatagtacatatgacggacataccgtcggtggactgcagtatggagggctggggcaactggctgatggagtggtgggcctcgacgactttcggaaatctcaggaattaagagtctggccaggatacgactatgtgggatggagcaaccatagcttctcttcagggtatgtggaaatggagttcgagtttgatcggttaagagcgtttcaggctatgcaggttcattgcaataacatgcacacactgggcgcacgtctccctggtggcgtagagtgcagattccgcaggggccccgctatggcctgggaaggcgaacccatgaggcacaacctgggaggcaatctcggcgacccacgggcccgtgctgttagtgtgccacttggcggaagggttgcccggtttctccaatgtagattcctcttcgcagggccctggcttttattctccgaaatctcctttatttcggacgtcgtaaacaactcttccccagcactcggcggaaccttccctcccgcaccatggtggccaccaggacccccccccacaaacttttcttcccttgagctcgagccacgcggccagcaacccgtcgcaaaagccgagggatctccgaccgccatcctgattggatgtctggttgctatcatacttttgctactgctcattatagctcttatgctctggcgactgcactggcgccggctcctctctaaggctgaacgtcgcgttctcgaggaggagctcaccgtgcatctgtctgtacccggagatacaattctgatcaataatcggcctgggcctagagaacccccaccctaccaagagccccgaccacgtggaaaccctccccacagcgccccttgtgtgcctaacggttctgctctgcttctgtcaaatcctgcttaccgtctgttgcttgctacatatgcgcgcccaccacggggtccaggcccccctaccccagcctgggcaaagccaactaatacccaagcgtattctggcgattacatggaacctgagaaacctggcgccccgctgctccccccacctccacagaattccgtaccccattatgccgaagccgatattgtgaccctgcagggagtgaccggcggcaatacctacgccgtacccgcccttcctcctggagccgttggagacggtcccccccgtgttgatttcccaaggtctagactaaggtttaaggagaaactaggcgaagggcaatttggtgaggtgcacctatgtgaggtagactcaccacaggatcttgtgtccctcgactttcccctgaatgtgcgaaagggtcaccctctcctggtggcggtgaagattctgagacccgatgctaccaagaacgccagcttcagtctgttcagccggaacgatttcctgaaagaagtgaagattatgtcacgtttaaaggaccctaatattattcgccttctgggcgtgtgcgtccaagacgatccactttgtatgattactgactacatggagaatggagatttaaaccagtttctgtctgcacatcaactggaagataaagccgccgagggagctccaggagatgggcaggcagcccagggcccaactatttcctaccctatgctgctgcacgtcgccgctcagatcgctagtggaatgcgctatctcgccactctaaactttgttcacagggacttagccacacgtaattgcttagttggtgaaaatttcacaatcaaaatcgcagatttcggcatgtctagaaacttgtatgcgggtgattattaccgggtccagggtcgcgcagtcctgcctattaggtggatggcttgggagtgcatcttgatgggaaagtttaccactgcctcagacgtttgggccttcggcgtaaccctctgggaggtattgatgctttgtcgtgcccagccattcggacagcttacagacgaacaagtaatcgaaaacgccggggaattcttcagagatcagggtcgacaggtgtatctgtcccggccacctgcatgcccacagggattgtacgaactcatgctgcgctgttggagtagggagagtgaacagcggcccccgttctcccagttacatcgtttcctcgccgaagacgcattgaatacagtttag

SEQ ID NO: 15027 - RNA, 447 nt, synthetic construct
  misc_feature 1..447: note = source = /note="Description of Artificial Sequence: Synthetic coding sequence"
  source 1..447: mol_type = other RNA
atgcagacctttcccgtggccggagcattagaccctgcaattctcgacacttcctcccctcaggctttatacactgtactcctgatcgtgttggttatgatgagcctggtgttcggcaaattcgtacctgtgaattgggaacctcctcagccgctgccatttccaaaatatctgcgatgctatcgctgcctcttagaaaccaaagagctgggctgtcttctcggatctgatatctgtctgacaccagccggctcctcatgtattaccttgcataaaaagaactcaagtggatccgacgtgatggtctctgattgccgctctaaagaacagatgagcgattgctcgaatacccgaacctctcccgtctctggattttggatcttctcacaatactgtttcctcgatttttgcaacgacccccagaataggggcctctacacaccttag

SEQ ID NO: 15028 - RNA, 5097 nt, synthetic construct
  misc_feature 1..5097: note = source = /note="Description of Artificial Sequence: Synthetic coding sequence"
  source 1..5097: mol_type = other RNA
atgagactgctgtggggactcatttgggcatcttcattcttcacgctgtcattgcaaaaacctcggctactcctgttctctccctctgttgtacatctcggggtgccgctgagtgtgggcgtccagttgcaagacgtgcctcgaggtcaggtcgtgaaaggtagcgtctttctgagaaacccgtcccgaaacaatgtgccttgtagtcccaaggtggactttaccttatcatctgaacgcgattttgctctactatccctccaggtgcccctgaaggacgccaaatcctgcggacttcatcagcttctgagagggccagaagttcagctggttgcacactccccctggctgaaggactcactttccagaacaaccaatattcagggcatcaatcttctcttcagttccagacgaggccacttatttctccagaccgatcagcccatatataacccgggccagcgagtgcgttatagggtgtttgcattagaccagaaaatgcgcccaagtaccgatactatcactgtgatggtggaaaactcccacgggcttagagtccggaaaaaggaagtgtatatgccatctagtatcttccaggacgattttgtcataccagatatctcagagcccggcacttggaagatttctgcccgctttagtgatggtctcgaaagcaatagctcaacccagttcgaagtgaagaaatatgtcctgcctaatttcgaggttaagatcacccccggtaaaccgtacatccttactgtgccaggtcacttggacgagatgcagctggacatccaggcaagatatatctatggcaaacctgtacagggcgtcgcctacgtgcgattcggacttctcgacgaagatgggaaaaaaacattctttagaggactggagagtcagacaaaactagtcaatgggcagtcacacatttccctgtccaaagccgaatttcaagatgcgctggagaagctcaacatgggcatcacagacctacaggggctcagactgtatgtcgctgctgcaatcatagaataccctggaggggagatggaagaggcagaactcacatcatggtatttcgtcagctcaccattcagcctagacttaagtaagacaaaaagacatcttgtccccggagctcctttcctgctgcaagctcttgtccgcgaaatgtccggctcacccgcatctggcatccccgtgaaagtgtccgccacagtaagtagtccaggatcggtgcccgaagtgcaggatatccagcaaaataccgacggatctggacaggtgtctattcccataatcatcccacagaccatttcagaactgcaactatccgtatccgctggcagtccccaccctgccattgcccggttgacagtggctgcgccaccctccggaggtcctggtttcctaagcattgaacgacctgactctcggcctcctagagtaggagacactcttaaccttaacctgagagctgttggctcaggtgctaccttcagccattattattacatgattttatccagaggccaaattgtgttcatgaacagagagccaaaaaggacactgacatctgtaagcgttttcgttgaccatcacttagcaccctcattctattttgtggccttttattatcacggagaccatcccgtggccaacagcctaagagtggacgtccaggccggggcctgcgaaggcaaattagagctgagcgttgacggagcaaagcaatatagaaacggggagagtgttaaactccacctagagacagattcactcgcactcgttgctcttggcgcactggacaccgccttgtacgcggctggctctaagtcacataagccactaaacatggggaaagtctttgaggctatgaattcctacgatctcggatgtggacccggagggggggacagtgccctccaagtttttcaagccgccggcctggctttcagcgacggagaccaatggaccttatccaggaaacgcctgtcatgtcctaaggagaaaacaacccgaaaaaagcgtaacgtgaactttcagaaagcaatcaatgaaaagttgggtcagtatgcaagtcctactgctaagaggtgttgccaggacggcgtcacaagactacctatgatgagatcctgcgagcagcgcgcagcccgggtccaacagcctgactgccgcgaaccttttctaagctgctgtcagtttgctgaaagcctgagaaagaagtccagagataaaggacaagccggactacaacgggcactggaaattcttcaggaggaagatttaatagacgaagacgatatcccagtccgctcctttttccctgaaaattggctttggagagtcgaaaccgtggatcgcttccagattctaactctgtggttgccagattcattgactacctgggagatacacgggctttctctatcaaaaaccaaaggactatgcgtagctactcccgttcagttaagggtgtttagagagttccacttgcacctgagattgcccatgagtgttcgcaggttcgaacaacttgaactgagacccgttttatataattacctggataagaacttgactgtatctgtacatgtgagtccagtagagggactgtgtttagcagggggaggaggactcgcccaacaggtgctggtgcctgccggctctgctcgtccagtggccttctccgttgtgccaacagcagctgcagcggtgtcactaaaggtagttgctagaggcagctttgaatttccggtgggcgatgcggtgtccaaagtgctccaaatagaaaaggaaggcgcaatccacagagaagagctggtgtatgaactgaatccgctcgatcaccggggccgtaccctagagattcctggaaattctgacccaaacatgatccccgatggtgatttcaatagctatgtgagagtgaccgcttccgaccctctcgacacgttgggcagcgaaggggccctgtcaccaggtggtgtggcatccctgctgcgtttgccaagagggtgtggggaacaaacaatgatctatctcgccccaacactggccgcctcacggtacctagacaagacagagcaatggagcaccctccccccggagacaaaagaccacgctgttgatcttattcaaaaagggtatatgagaatccagcagtttcgtaaggctgacgggagctacgccgcatggcttagtcgaggatctagcacctggctgaccgcatttgttctaaaagttctttctctagcacaggaacaggtcgggggctcaccagagaaattacaagaaacatctaattggctgctctctcagcaacaggcggacggcagcttccaggacctgtcccccgtaatccatagatccatgcaaggaggacttgttggcaatgacgagacagtggccctgacagcattcgttacgattgctttgcaccatggcttggcagtgttccaagacgagggtgcggaacctctgaagcagagagttgaagcttccatttctaaagcctcctcatttttgggcgaaaaggctagcgccggactcctgggggcccacgctgcagcaattactgcctatgccctcaccctcacaaaagcccctgcagacctcaggggtgtggcacacaacaacctaatggctatggctcaagagaccggcgataacttgtactggggctctgttacaggaagtcagagcaatgctgtttcacctacacccgctcccagaaatccttctgacccaatgcctcaggctcccgccctctggatcgaaacgaccgcatacgcactgctacacctcttgctgcatgaaggcaaggcagaaatggctgatcaggccgcagcttggctgactcgtcaaggttccttccagggcggcttccggtctacacaggatacagttatcgccttggatgcattgagtgcctactggattgcttctcacaccaccgaggagcgcggattgaacgtgaccctgtcatctactggccgtaatggttttaagtcccacgccttgcaacttaacaacagacagattagggggttagaggaggagttacagttctccctgggcagcaagatcaacgtcaaggtcggcgggaattctaaaggaactttgaaggtcctacgcacctacaacgtgctcgacatgaagaacactacatgccaagacctgcagatcgaggttactgttaagggccacgtggagtatacgatggaggccaatgaagattacgaggattatgagtatgacgagctaccagctaaagatgacccagacgcaccccttcaacccgttacacccctccaactgtttgagggacggagaaatcggaggagacgcgaagcgcccaaactgacgtccctgagtgatagatatgtctcccatttcgaaacagaaggcccacacgtgctgctgtattttgatagtgtccccacgtctcgggaatgtgtcggcttcgaggctgtgcaggaagtcccagtgggcttggtccaaccagcatccgccactctctatgattactacaacccagaacgccgatgtagcgtcttctatggtgcaccatccaaatcccgccttctagcaactctgtgctcagccgaagtttgccaatgtgcagagggcaagtgcccccgccagagaagagccctggagcgcggactccaagacgaggacggataccggatgaagtttgcttgttactaccctagagttgagtacggtttccaggtaaaggtactaagagaggatagcagggcggcttttcgcctgtttgagaccaaaattacccaggttttgcatttcactaaggatgtgaaagctgccgctaaccaaatgagaaatttcctggtgcgcgcatcgtgtagactgcgtttggagccaggcaaggaatatctaattatgggattggatggagcaacttatgacctcgaaggccacccacagtacctattagattccaattcttggatcgaagagatgccatcagagagattgtgccggtctacaaggcagagagcagcatgtgcccagttgaacgacttcttacaggagtacgggacccagggctgtcaggtctag

SEQ ID NO: 15029 - RNA, 1986 nt, synthetic construct
  misc_feature 1..1986: note = source = /note="Description of Artificial Sequence: Synthetic coding sequence"
  source 1..1986: mol_type = other RNA
atggacctcgttctcaagaggtgtctccttcatctagcggtgattggagcgttattagccgtcggtgcaactaaggtccctcgtaaccaggattggttgggtgtgtccagacagctaagaacgaaggcttggaaccggcaactgtaccccgaatggaccgaagcgcagaggcttgactgctggcgaggaggccaggtcagcctgaaagttagtaatgacggtcctacactgatcggcgcaaatgcctctttctccattgcattgaattttcccggctctcaaaaggtcctaccggatggccaagtgatttgggttaataacacaatcattaatggcagccaggtgtggggaggacaaccagtttacccccaagaaaccgatgacgcatgtatttttcctgatggtggaccatgtccttctgggtcatggagccagaaacggtccttcgtgtacgtatggaagacatggggacagtattggcaggtgcttggtggccctgtgagtggcctcagcattggcacgggacgggctatgcttggaacccatactatggaagtcacggtgtatcacaggagagggagccgttcttacgttccgctggctcattcttcctccgcgtttaccattacagatcaggtcccgtttagcgtatctgttagccagctgagagccctagatggcggaaataaacactttttgcgcaaccaacctctgacttttgctctccaattgcatgacccatctgggtacctggcagaggccgacttgtcttacacctgggactttggcgatagctcagggacgctaatttcacgcgccctcgtggtcactcacacctaccttgaaccaggacccgtgacggcacaggttgtgctacaggcagctataccactaactagctgcggtagctctccagtccccgggaccacagatggacatcgcccaaccgccgaggctcccaataccactgcgggtcaagtgcctacgaccgaggtagttggaacaactccaggacaggcccccacggctgagccctcgggcacaacatcagtgcaagtccccaccaccgaagtgatctccaccgccccagtccagatgcctaccgccgagagcactggcatgacacccgaaaaggtgcctgttagcgaagtcatgggaacaactctggccgaaatgtctacccctgaagccaccggcatgacccctgccgaagtctcaatagtggtcctaagtggcacaacggccgcccaagtcacgaccacagaatgggtggagaccaccgccagggaacttcctattcccgaacccgagggaccagatgcttcaagcattatgagcacagaatctattacagggagccttggacccttacttgacgggacggcaaccctgaggttagtcaagcggcaagttcctctcgattgcgttttgtatagatatggatcattttcagtcacgctcgatattgttcagggaatcgaatctgctgaaattttgcaagccgttccaagtggggagggggacgccttcgaactgactgtgtcctgccagggggggctgcccaaagaggcctgcatggagatcagttctcctgggtgtcagccacctgctcaaagactctgtcaacctgttttaccttctcctgcctgtcaactggtgcttcatcaaattttgaagggggggagcgggacctactgtttaaatgttagtctagccgacaccaactcactcgctgtcgtatccacccaactcattatgccaggtcaggaagccggcctgggacaggtgccactgatcgtgggtatcctgctagtactcatggctgtagtgttggcaagcctgatctacaggagaagactgatgaaacaagattttagtgttcctcagctgccccattcctcctctcactggctaagacttcctcgaattttctgttcttgtcccattggagagaattcccctttactgtccggacagcaagtgtag

SEQ ID NO: 15030 - RNA, 516 nt, synthetic construct
  misc_feature 1..516: note = source = /note="Description of Artificial Sequence: Synthetic coding sequence"
  source 1..516: mol_type = other RNA
atgaggcacaatcttggaggcaacctcggcgacccccgtgcacgggccgttagcgttccacttggaggccgagtggccagatttttgcagtgccgttttctttttgcaggaccatggttgctgttctcagagatctcctttatctccgatgtggtcaataactcctctccagctctgggcggcaccttccctccggccccctggtggcctcccggtcctcctcccaccaacttttccagtctagaactggagccccgcggtcaacaacctgtggccaaggccgagggcagccctacagctattctaattggatgccttgtggctattatactcctgctgctgttaataatcgcactgatgctgtggcgattgcactggaggaggctcctctctaaggtcctagagtcacacccccgaacaaggagtcctggactggtcggtattagacccacccctcttcctgtctctccaatggcactcgtccacctctgcgaagtcgactctcctcaggattag

SEQ ID NO: 15031 - RNA, 1986 nt, synthetic construct
  misc_feature 1..1986: note = source = /note="Description of Artificial Sequence: Synthetic coding sequence"
  source 1..1986: mol_type = other RNA
atggatttggtgcttaagagatgtctcctacacttagccgtgatcggcgccctcctggccgttggggccactaaggtccccaggaatcaagactggctgggggtaagcagacagttacgcacaaaggcttggaacagacagctttaccctgagtggacagaggcccaacgtctggattgctggagaggaggacaggtgtcattaaaagtttcgaacgacgggcccaccctaattggggcaaacgccagcttctctattgcccttaactttcctggttctcagaaggtcttacccgatggccaggtgatttgggttaataataccatcatcaacggatcacaggtctggggtggtcagcccgtatatccccaggaaacagatgatgcatgtatctttcccgatggtggcccttgtccctctgggtcttggagtcagaagaggtccttcgtgtacgtctggaagacctgggggcagtactggcaggtcttgggggggccagtctctggtctgtcaattggaacgggtagagcaatgttaggaacgcacactatggaggtaacggtgtatcacagaagaggaagcagatcttacgtgccactcgcacatagctcttccgcctttaccattacagaccaggttcctttcagtgtgtcagtatcccaactgcgggcactggatgggggcaataaacatttccttcgcaatcagcccctgacattcgccctacagcttcacgacccttctggatatttggccgaggccgatctaagctatacttgggactttggcgattcctccggtacactgatttcacgagcattagtcgtcacacacacttatttggagcccggccccgtgaccgcacaggtagttctccaggcagccattccactgaccagctgcggaagcagcccagtgcctggaactacggatggccatcgcccaactgcagaagcccctaacactaccgcaggccaagttcctactacagaagtggtcggcaccacccctggtcaggcacctacagccgaaccgagtggaacgacctccgtgcaagtccccacaactgaggtgatctcaactgcaccggtgcaaatgcctaccgcagaaagcacaggtatgacccccgaaaaagtccctgtttccgaagtcatgggcactaccttagcagaaatgagcaccccagaggcaacaggtatgacaccggccgaagtgtcaatcgtagtattatccggaacaaccgcagcacaagtgactactacagagtgggtggaaactaccgcgcgggagctgcctatcccagagcctgaaggtcctgacgccagttcaatcatgtccacagaaagtatcacaggaagtctgggccccttacttgacggaactgccactttaagactcgttaaacggcaggtccccctcgattgcgttttataccgttacgggagttttagcgtgaccctggatattgtgcaggggattgagtctgcagagatcctgcaggctgttcccagcggcgagggtgatgcatttgaactgaccgtgagttgtcagggtggactgcctaaagaagcttgtatggaaatatcttcgcccggttgccagcctcctgcacaaagattgtgtcaacctgtcttaccctcccccgcttgtcagctggtgcttcatcaaatccttaaaggaggctccggcacctattgtctgaacgtgagtctcgccgacactaactctctcgctgtcgtcagtacccagcttataatgcccggtcaggaagctgggctcggccaggtccctcttatcgtgggcattctgttagtcctgatggccgtggttctggcatctctgatctatcgtagaaggctcatgaagcaagactttagcgtcccacagctgccccactcgagttcccactggctgagactgccgcgaattttttgttcatgccccattggtgaaaatagccccctcctcagtggccaacaagtttag

SEQ ID NO: 15032 - RNA, 1737 nt, synthetic construct
  misc_feature 1..1737: note = source = /note="Description of Artificial Sequence: Synthetic coding sequence"
  source 1..1737: mol_type = other RNA
atgttgctgctgctactactcgcccccctattcttacgtcctcccggagcaggcggcgcgcagactcctaacgcaacatccgagggctgtcagatcatacaccccccatgggaaggcggaatcagataccgcggcctgacaagagatcaggttaaggcgattaactttttgcccgtggactacgaaattgaatacgtctgccgaggcgaacgagaagtagtcggacccaaagtgcgtaagtgcctggcaaacggctcctggactgatatggacactccaagcaggtgcgtaagaatttgcagcaaaagttacttaactctcgaaaatggcaaagtgttcctgaccggaggggatctaccggcactcgacggggcacgcgtggattttcgatgcgatcccgactttcacctggttgggtcttctcgatccatttgctcacagggccagtggtctacgcctaaaccacactgtcaagttaatagaaccccccactcggaaagaagagctgtttacattggggcattattccctatgtcgggtggttggcctggcgggcaagcatgccagcctgcggtggagatggcactagaggacgtgaactctcgccgtgacattctgccagactacgaattaaagcttatacaccacgatagcaaatgtgaccccggacaggccacaaaatacttatatgagttactatataatgaccctataaagattattctgatgccaggttgcagttctgttagcaccctggttgctgaggctgcacgtatgtggaacctgatcgtcctctcctatggcagcagcagccccgctttgtccaaccgccagcgctttccaacattttttaggactcatccttcagccactctacataacccaacgcgtgtcaaactcttcgaaaaatggggatggaaaaagatcgctacaatccagcagaccactgaggtttttacctccacacttgatgatctggaagagcgcgtcaaagaggcgggcattgaaatcacatttaggcagtcgttttttagcgaccccgccgtcccggtcaaaaatttaaagagacaggacgcacgcataattgtaggattgttttacgagacagaagctcgcaaggtgttttgcgaagtttacaaggaacgcttgtttgggaagaagtatgtttggtttctcatcggatggtatgccgataattggttcaagatatacgaccctagtatcaactgtactgttgacgaaatgaccgaggcagtggagggccatattactacagagattgtaatgctcaatccagccaacacgagatccatcagtaacatgacttctcaggagttcgttgaaaagctgacaaaacggttgaagagacacccggaggaaactggtgggttccaagaagcccccctggcctacgacgccatttgggccctcgccctagctctaaacaaaactagcggaggaggtggtaggagcggagttcggctggaggactttaattataacaatcaaacaatcacggaccagatttatagagctatgaattcttcaagtttcgagggagtgagcggccatgttgttttcgacgcttctggttcccgaatggcctggacactgatcgaacagttgcagggaggctcatataagaaaattgggtattatgactccaccaaagacgatctctcttggtctaagacggataaatggattgtgatctctaggactcactctcccacatag

SEQ ID NO: 15033 - RNA, 1326 nt, synthetic construct
  misc_feature 1..1326: note = source = /note="Description of Artificial Sequence: Synthetic coding sequence"
  source 1..1326: mol_type = other RNA
atggagttcgagttcgacagactgagggcattccaggcaatgcaagtgcactgcaacaacatgcataccttgggcgcccgcttaccaggaggggtcgaatgccgctttcgtagaggtccagcaatggcctgggagggagagccaatgcgccacaatttgggcggcaaccttggggatccacgggcccgcgcagtctcagttcctctgggggggagggtggctcggtttctacagtgtagatttttgttcgcgggaccttggctgctgttttctgaaatctctttcatatcagatgtggtcaacaacagctcccccgctctgggaggtaccttcccccccgctccctggtggccccccggaccccctcctaccaactttagttccctggaattagaacctcgaggtcagcaacccgtggccaaggccgaggggtcgcccactgccattctcatcggatgcctggtggctatcatcctgttgttgcttctcataatcgcacttatgttgtggagactgcattggcgaaggcttctaagcaaagtgttagaatctcaccccagaacaaggagcccaggcctcgtcggtataagacctacccctctacccgtgtcacccatggccctgcggtgttgttctcccattcagccaaccgcttcattctggcccctaactcccgtacccttagaagcaagagctccaccccatccccccggcccgaatccacctacaccacggggcgtgactggcggcaatacctacgcagtgccagctctgccgcccggagctgttggtgacggaccgcccagagtggacttccctcgcagtaggttgaggtttaaagaaaaactgggagaaggccagtttggagaggtccacttgtgtgaagtcgacagtccacaggatctcgtgtccctggacttccccctcaacgtaagaaaagggcatcccctcctagttgcggttaaaatcctccgcccagatgcaacaaagaacgctcggaacgattttctgaaggaagtgaagattatgagtagacttaaggatcccaatattatccggcttctaggagtgtgcgtacaagatgaccccctgtgtatgatcaccgactatatggaaaatggcgacctcaaccagtttctcagtgcccaccagctcgaggacaaggccgctgaaggagcgcccggagacggtcaggccgcccagggaccgactatctcttaccccatgctcctccacgttgctgcccagattgccagcggaatgaggtacctcgctactcttaacttcgtacatttctggggcgaacgccaccgtttcctgcattag

SEQ ID NO: 15034 - RNA, 447 nt, synthetic construct
  misc_feature 1..447: note = source = /note="Description of Artificial Sequence: Synthetic coding sequence"
  source 1..447: mol_type = other RNA
atgcagacatttcctgtagccggcgccctggacccagccatcctcgacacctccagcccccaggccttatatacagtattactaatcgttctcgtgatgatgagccttgttttcggaaagtttgtcccagttaattgggagcccccccagcccctaccattccccaaatatctgaggtgttataggtgcctcttggagaccaaggaattgggatgcctacttggaagcgacatctgtctcactcccgctggaagctcatgtattaccttgcacaaaaagaactcatcaggctctgacgtaatggtctccgattgtcgatccaaagagcaaatgtccgattgtagcaacactcgcacttcgcctgtgtctggcttctggattttttcccagtattgttttcttgatttctgcaatgatccacaaaataggggcttatacactccatag

SEQ ID NO: 15035 - RNA, 732 nt, synthetic construct
  misc_feature 1..732: note = source = /note="Description of Artificial Sequence: Synthetic coding sequence"
  source 1..732: mol_type = other RNA
atgggtcctgaggcgctctcatcactactgctgcttcttttagtcgcctcaggcgatgctgacatgaagggccatttcgaccccgccaagtgtaggtacgctctcggcatgcaagatagaaccatccctgactccgacattagcgcatcctcctcctggagcgatagcaccgccgcccgccactctcgactggagtcttccgacggcgatggcgcctggtgcccagcaggttccgtctttcccaaagaagaggaatacctccaagtcgaccttcagagattgcacttagtcgcactcgtgggaacacagggcaggcatgcaggagggctgggcaaagagttttcccggagttataggctacgatacagccgcgacggccggagatggatggggtggaaggatcggtggggtcaagaggttatctctggaaatgaagatcccgagggcgtcgttttaaaggacctcggccctcctatggtagctagactcgtaagattctacccgagggctgatcgggtcatgtcagtttgtctaagagtagagttatacgggtgcctgtggcgggattgtagtatgggagtctgggcaagttggcagatggtgtggtgggggtggatgactctgggacgggtacgatcatgtgggtccgggcaagcaatgacaatgtgggatggcgctaccaccgcaagccccgtcgcaatgtggcgctggtccctttctctgactggttag

SEQ ID NO: 15036 - RNA, 732 nt, synthetic construct
  misc_feature 1..732: note = source = /note="Description of Artificial Sequence: Synthetic coding sequence"
  source 1..732: mol_type = other RNA
atgggacccgaagctctgtcaagtttgctgttgcttctcttagtcgcttccggcgatgctgatatgaaagggcacttcgacccggccaaatgtagatatgccctgggcatgcaggatcgaaccattcccgacagcgacatctccgcttcctcttcttggagtgactccacagctgcacgacactcccgactggagtcatccgacggtgacggtgcctggtgtcccgccggttcggtctttccaaaagaagaagaatacctgcaagtggaccttcagcgcctgcacctcgttgccttggtcggcacccagggtcggcacgccggagggctaggaaaagaattttcgcgcagttaccgtctgcgttattcacgtgatggcaggagatggatggggtggaaagatcggtggggtcaagaagtgattagtgggaatgaggatcccgaaggggtggtactgaaggatctaggccccccaatggtggctcgtttggttagattttatccaagagctgatcgcgtcatgtccgtttgccttagggtcgaactgtatggatgtctgtggagggattgtagcatgggagtgtgggcctcttggcaaatggtgtggtggggatggatgactttgggccgagttagaagctgtggctctggacaggccatgaccatgtgggacggtgcgactaccgcttcaccagttgcaatgtggcgctggtccttgtctttaacgggatag

SEQ ID NO: 15037 - RNA, 1224 nt, synthetic construct
  misc_feature 1..1224: note = source = /note="Description of Artificial Sequence: Synthetic coding sequence"
  source 1..1224: mol_type = other RNA
atgagactgctcgcttggctgatttttcttgcgaattggggcggggcacgcgccgagccgggaaaattttggcacattgccgacctacacctggacccagattataaagttagcaaagacccgtttcaggtctgcccctccgccggatcccagccagttcccgacgctggcccctggggcgattatctgtgcgactcaccatgggcactcattaacagctctatttatgccatgaaagaaattgagcccgaaccagattttatcctttggacaggcgacgataccccgcacgttccagatgaaaaacttggagaagcggctgtccttgagatcgtcgagcgccttactaaactgatcagagaagtcttcccaggggccttttactgtgaaaagttacccggaccttccggggccggacgcattgtggtccttaataccaacctttattatacaagcaacgccctcacggctgacatggccgaccccgggcagcaattccaatggttagaagatgttctcaccgatgcaagcaaagcaggtgacatggtgtatatcgttggccacgtccccccaggcttctttgaaaaaacgcagaataaagcatggtttcgggaggggttcaacgagaagtacctgaaagtcgtgcggaagcaccatcgggtgatagccggacagttttttgggcaccaccataccgattcttttagaatgttgtacgatgacgcgggagtccctattagcgccatgttcatcacccctggcgtgacaccctggaagacaacattgccaggcgtggttaacggggccaacaatccagcaatccgggtcttcgaatatgaccgagctacgctgtcattaaaggacatggttacctatttcatgaacttaagtcaggcaaatgctcagggcacccctcgttgggaattggagtaccagctcaccgaggcttacggcgtcccggacgcttctgcccattctatgcataccgttctcgacaggattgccggggatcaaagtaccctccagcgatactacgtctacaattccgtgtcctactcggccggagtgtgcgatgaagcttgttcgatgcaacatgtttgtgcaatgcgacaagttgatattgatgcttacaccacctgcctgtacgccagcggcacgactcccgtaccacaactacctctgttactgatggctctgctcggattgtgtactcttgtcttgtag

SEQ ID NO: 15038 - RNA, 756 nt, synthetic construct
  misc_feature 1..756: note = source = /note="Description of Artificial Sequence: Synthetic coding sequence"
  source 1..756: mol_type = other RNA
atgccacatttagccagcctgttcacagctagctctcgatgctgtcctcatcctctcaggcccgaaggctccggcgcgatggggcccgaagcactgtccagccttctgctcctgctccttgtggcttctggagacgcagacatgaaaggacacttcgatccagccaaatgcagatacgctttgggcatgcaagacagaacaattcccgattccgacatttctgcttcaagcagctggagcgactctactgccgcgagacacagcaggttggaaagttccgacggcgatggcgcatggtgccctgctggctccgtgtttcccaaagaggaagagtacttgcaggtcgacttacagaggctacatctggtcgcattggtcggtacacaaggcaggcacgctggcgggttggggaaggaattttcacggtcttaccggctgcggtactctcgagatggtcggagatggatgggatggaaagatcggtggggacaggaagtcataagcgggaatgaggatccggagggcgttgtcttaaaggacttgggcccgcctatggtggcccgactggtgagattctacccacgcgctgacagagtgatgagtgtctgccttagagtggaattgtacggatgtttatggagaggggagtggttatcctttctaggcatttgtttcctttcccggggtctagaaggcggcgaatgtggcgagtgggcatcacggattccttcacccgctggaaagttgtccctgtag

SEQ ID NO: 15039 - RNA, 756 nt, synthetic construct
  misc_feature 1..756: note = source = /note="Description of Artificial Sequence: Synthetic coding sequence"
  source 1..756: mol_type = other RNA
atgccccatttggccagcctgtttactgcttcaagccgatgttgcccacacccgctgaggcctgagggatccggcgctatgggaccagaagccctctctagcttgctgctccttctgctcgttgcatccggtgacgcagacatgaaaggtcatttcgatcccgcgaaatgtaggtacgctttggggatgcaagaccgcactatccccgacagtgatatttccgccagttcgtcctggtctgacagcaccgctgcgaggcactcccgactagaatcttccgatggagatggtgcgtggtgcccagctggttcggtattcccaaaggaggaggaatacttgcaggttgacctgcagcgactccacttagttgcactcgtgggcacccaaggcagacacgctgggggattgggcaaggagttttcacggtcataccggttgagatacagccgagacggacgacggtggatgggatggaaggataggtgggggcaggaggtaatatcagggaatgaagatcctgagggggtggttctgaaggacttgggtcctcccatggtggccagactggtgcgcttctatccacgggccgatcgggtcatgtcagtgtgcctgcgagttgagctttacgggtgtctgtggcgcggggaatggctttctttcctggggatctgtttcttatcaagagggcttgagggcggagagtgtggcgagtgggcttctagaattccctcaccagccggtaaattgtcactgtag

SEQ ID NO: 15040 - RNA, 456 nt, synthetic construct
  misc_feature 1..456: note = source = /note="Description of Artificial Sequence: Synthetic coding sequence"
  source 1..456: mol_type = other RNA
atggatctcgtcctcaagcggtgtttgctccacctcgctgtgataggcgcgctgctcgcggtcggtgccaccaaagtgcctcgaaatcaggactggctgggcgtcagtcgccagttacgcaccaaagcatggaataggcaactgtatcccgaatggacagaagcccagagactggattgttggagaggcgggcaagtgtcactcaaagtttccaacgatggccctacattgattggtgcaaacgcgagtttcagcattgcattaaactttccaggctctcagaaagttctacctgacggccaggtgatatgggtaaataatacgatcataaatggaagtcaagtatggggaggccagcccgtctatccacaagaaacagacgacgcatgtatattccctgatggtggtccatgcccgagcggtagctggtcccagaagcggtcttttgtgtattag

SEQ ID NO: 15041 - RNA, 216 nt, synthetic construct; identical to SEQ ID NO: 13402
  misc_feature 1..216: note = source = /note="Description of Artificial Sequence: Synthetic coding sequence"
  source 1..216: mol_type = other RNA

SEQ ID NO: 15042 - RNA, 447 nt, synthetic construct
  misc_feature 1..447: note = source = /note="Description of Artificial Sequence: Synthetic coding sequence"
  source 1..447: mol_type = other RNA
atgcaaacctttcccgttgctggagctttagaccccgccatcttagacactagttctccccaagccctgtacacagtcctgttaatcgtattggttatgatgtccctggttttcggtaaattcgtccccgtgaattgggagccaccccagcctctgccgtttccaaaatatttacggtgttaccggtgcctcctcgagacgaaggaactcggctgtctgctaggatccgatatctgtcttacccccgccggtagttcttgcatcactttacataagaaaaattcgtccggctccgatgtgatggtgtccgattgtagatccaaggagcagatgagcgattgcagtaatacaaggaccagtcccgtgtcagggttttggattttctcccaatattgttttttagatttttgtaacgatcctcagaacagaggactttataccccttag

SEQ ID NO: 15043 - RNA, 447 nt, synthetic construct
  misc_feature 1..447: note = source = /note="Description of Artificial Sequence: Synthetic coding sequence"
  source 1..447: mol_type = other RNA
atgcaaaccttccccgtggccggagccctcgacccagcaattctggacacatcaagccctcaagctctctacactgttctgctgatcgttcttgtcatgatgtccctggtgttcggaaagtttgtgcccgtgaattgggaaccaccacagccccttccctttccaaagtatctgcgctgctatcgatgtcttttagagacaaaagagctgggatgtctgttagggagtgatatttgcctgacacccgccggttctagttgcatcactttacacaagaagaattccagcggaagtgacgtgatggtatccgactgtagatctaaagaacagatgtccgactgctcaaacaccagaacttcacccgtctcaggattttggattttctcgcagtactgcttccttgatttttgcaatgatccacagaacagggggttgtacacaccatag

SEQ ID NO: 15044 - RNA, 1326 nt, synthetic construct
  misc_feature 1..1326: note = source = /note="Description of Artificial Sequence: Synthetic coding sequence"
  source 1..1326: mol_type = other RNA
atggaattcgaatttgaccgactgagggcatttcaggcaatgcaagttcactgtaacaatatgcacaccttaggcgccaggctccccggaggcgtcgagtgccggtttcggcgaggacccgccatggcatgggagggtgagcctatgcggcacaatctaggcggtaacctcggagaccccagagcccgagctgtctctgtgcctcttggcggaagagtggcccggtttcttcagtgcaggttcttattcgccggcccatggttgctattctcagaaatatcattcataagtgatgtggtgaacaattccagccccgccttaggtggcaccttccctcctgctccttggtggccaccaggaccgccaccaactaatttttcctcccttgaactggaaccccgcgggcaacagccagtcgccaaagccgaaggttctcctaccgcaattttgataggatgcttggttgcgataatcctgcttctgttactaattatcgccttgatgctgtggcgcctacactggcggagactcctgtctaaggtgttggaatctcaccccaggactagaagcccaggtctagtcggtataagacctacacctcttccagtgtcaccaatggcactccgctgttgttcccccatacaaccaacggcatcattttggccactcacccctgtcccattggaagcacgggctccaccacaccctccaggccctaaccccccaacgccccgcggagtaactggggggaatacgtatgccgttcctgccctaccaccaggcgccgttggcgatggtccacctagagtagatttcccccggtctcggttacggttcaaagaaaaactaggagaggggcagttcggtgaagtgcacctttgcgaagtggacagtccccaagacctggtctccctggacttccctctcaatgtgagaaaaggccatcccctgttggttgcagtcaagatcctccgccctgacgccacaaagaatgcccgcaatgacttcctaaaagaggtgaaaataatgtcacggctgaaagaccctaatataatccgcctcttaggagtttgtgtccaagatgaccccctgtgtatgatcaccgactatatggaaaatggagacctcaaccagttcctatccgcccatcagcttgaggacaaggcggccgagggcgcgcctggcgacggacaagcagcccagggcccaactatttcataccccatgctgttgcacgtagccgctcagatcgcaagtggcatgagataccttgctacacttaatttcgtacacttttggggcgaaagacacagatttctccattag

SEQ ID NO: 15045 - RNA, 2067 nt, synthetic construct
  misc_feature 1..2067: note = source = /note="Description of Artificial Sequence: Synthetic coding sequence"
  source 1..2067: mol_type = other RNA
atgttaccaacagaagtgccacagagccaccccggtcccagcgctctcttactattacaattactcctcccccctacatccgcattcttccctaacatttggagtctccttgccgccccagggtctattactcaccaggatcttaccgaagaagcagctctgaatgtgaccctgcagctctttctggagcaacctcctcccggcagacccccacttcgattggaggacttcttaggccggaccctcctggcagacgacctcttcgcagcttatttcggacccggtagttccagacgctttcgggcagcactgggcgaagtgagtagagctaacgctgcacaggactttctacccacgtcgcgtaacgatcccgatctccatttcgatgctgagcgcctgggacagggtagagcgcgcttagttggagccctgagagaaacagtagtggccgcccgcgcactggaccatacgttggcccggcagaggctcggagccgcattgcacgccctccaggacttctactctcatagtaattgggtcgagcttggagagcagcagcctcatccacacttgctttggccccggcaggagctgcagaatctggcacaggtggccgatcccacatgttccgattgtgaagagctttcttgccctaggaattggttgggctttacacttttaactagcggatattttggaacacaccctcccaaacccccaggcaagtgctcccatggtgggcactttgaccgctcttcatcacaacccccccgcgggggcatcaataaagacagtacaagccctggtttcagcccacatcacatgctgcatctgcaggctgcaaagctggcgctgctggcttccatccaagctttttcactgctcaggtcccgactcggcgacagagatttttcacggctgctagatatcacccctgcctcatctctgagtttcgttttggacaccaccggctcaatgggcgaagaaattaatgctgccaaaatccaggcaagacatctcgtggaacaacggagaggctcacccatggaacctgtccactacgtgctggtacccttccacgatccaggattcggacctgtgttcactacctccgaccccgacagcttttggcaacaactgaatgaaatccacgcactgggagggggggatgaacccgaaatgtgtctctctgcacttcaactggctctgttgcatacaccacctttgtccgatatcttcgtttttacagatgcaagcccaaaagacgccttcttgacaaaccaggtcgagtctctaactcaggaacgaagatgcagagtcactttcctggttacggaagatactagtagggttcaaggtcgagctcgtcgggaaatcttgagtccactgcgctttgagccttataaagccgtggccctggccagtgggggagaagtaatcttcaccaaagatcagcacatcagagacgttgcggccatcgttggagagtccatggcagctcttgttactctccctttagatcctcctgtggtggttccagggcagccgctggtttttagtgtggacgggctgttacagaagatcactgtcagaattcatggtgatatatcttcgttttggatcaagaaccccgcaggtgtgagccaaggtcaggaagaaggcggagggccattaggccatacaagacgctttggtcaattttggatggttacgatggatgaccctcctcagacaggtacctgggaaatacaagttacagcagaggatacacctggcgtgagagttcaggcccaaacatccctcgatttcttgtttcacttcggtattccaatggaggacggtcctcatcccggtttgtacccattgactcagcctgtggccggcttgcaaacacagcttcttgttgagagccagtcgtggggatcaagcgcagcttttctgcccagacatccaagtaggggcccacgtgggtgccgaactagacccggagcattaggcgcacgtggtacaagcggagcccggtcacctcggagtctcgcagtggcgcacgccgccgtgcacccctag

SEQ ID NO: 15046 - RNA, 1326 nt, synthetic construct
  misc_feature 1..1326: note = source = /note="Description of Artificial Sequence: Synthetic coding sequence"
  source 1..1326: mol_type = other RNA
atggaattcgagtttgaccggttgagagccttccaagcaatgcaagtccactgcaataacatgcacacgctaggagccaggttacctgggggggtagagtgccggtttagacgaggccccgcgatggcctgggagggtgaaccaatgaggcacaatctgggtggaaacctcggcgatccccgtgcccgcgccgtgtctgtcccgctgggcggtagagtggctagattcctccagtgcaggttcttgtttgcaggaccgtggcttctgttctctgagattagctttatttctgatgttgtgaacaacagtagccccgccttgggagggacttttcccccagcaccatggtggccccctggccctcccccaactaacttttcatcccttgagctagaaccacgtggacaacaacctgtagcaaaagccgaagggtctcctacagctatcctgataggttgcttagtggctatcattctgttacttttactgatcattgccctgatgctgtggagactgcactggagaaggcttctctcaaaggtgcttgagtcccacccccgcacacggtcacccggactagtcgggattaggcctacactgctgcccgtctcacccatggctctgcgctgttgcagcccaatccaacctacagcttccttctggcctttaaccccagtcccacttgaagcgcgcgcaccccctcacccacctggacccaacccgccaactcccagaggagtgaccggaggaaacacatatgccgtgcctgcattacctccaggcgccgttggagacggacctccacgtgttgatttcccaagaagcagacttaggttcaaggagaagttgggcgagggacagttcggcgaggtccacttatgtgaggtcgatagccctcaggatctggtttcgcttgatttcccactcaatgtacgaaagggccacccattattagtggctgtgaaaatactgcgaccagacgctacaaaaaatgctcgtaacgatttcttgaaagaagtgaaaatcatgtctcgacttaaagatcctaacatcattcggctgctcggagtttgcgtccaagacgacccactctgtatgatcaccgactatatggagaatggtgacttaaatcagtttctgagcgcgcaccagcttgaggacaaggccgctgagggtgccccgggcgatggacaagccgcccaagggccgaccatttcgtatccaatgttgctccatgttgccgcacaaattgcctctggtatgcgctacctggccactctaaacttcgttcatttctggggcgagagacatcgcttcctccattag

SEQ ID NO: 15047 - RNA, 2559 nt, synthetic construct
  misc_feature 1..2559: note = source = /note="Description of Artificial Sequence: Synthetic coding sequence"
  source 1..2559: mol_type = other RNA
atgttgcccactgaggttccccaatcacacccaggacctagtgccctccttctgttacaattgctactgcccccaacctccgccttctttcccaacatttggtccctgctagcagctccgggaagcataacacaccaggatttgacagaggaagcagcccttaacgtgacactgcagctttttttggaacagcccccccctggtagaccgcctctgagacttgaagatttcctgggccgcactctactcgcggacgacctctttgccgcttattttggacctggatcatcgcgaagattcagagccgccctgggcgaagtgagcagagccaatgccgcccaggacttcctgccaacttctagaaacgatccagacctccactttgatgcagaaagattaggccaaggtagagcccggctggtaggagccttaagagagaccgtggtcgcagccagggccttggaccacacccttgcacgccagaggcttggagctgccctacatgctctgcaggatttttactcacattcaaactgggttgaacttggggagcagcagcctcacccccatcttttatggcccagacaagaactccaaaaccttgcccaggtggccgaccccacctgtagtgattgtgaagaactttcatgcccaaggaattggctaggcttcacactgcttacatcaggatattttgggacccatcctccaaaaccccccggtaagtgcagccacggcggacactttgatcgatccagcagtcagcctccacgaggcggaatcaataaggactcaacttcccccggcttcagcccacaccacatgctgcatctccaagctgccaaacttgccctgctggcgtcaatccaagcctttagtctactccggtcccggcttggtgaccgcgactttagcaggttacttgatattaccccagccagctctcttagcttcgtcctggacaccaccggaagcatgggcgaggaaatcaacgccgctaagattcaggccaggcacctcgtagagcagagaagaggtagccctatggaacccgtccactatgtccttgtcccgtttcatgaccccggatttgggcctgtattcaccacaagcgacccagactctttctggcaacaattaaatgaaattcacgccttgggcggtggagatgaacctgagatgtgtctttccgctctgcagctcgcactcctccacacaccccctctttctgatatctttgtgttcaccgatgcttcgcccaaggatgcatttctcacgaatcaggtcgaatcactaacccaagagcggaggtgtagggtgaccttccttgtgaccgaggacacatcacgggtgcagggtcgggccagacgggaaatactgagcccacttagattcgagccttacaaagctgtcgcacttgcctcgggtggggaggttatcttcactaaagaccagcacatccgagatgtcgccgcaattgtaggagaatccatggcagccctggtgactttacccttagatcctcccgttgtggtccccggccaacctctggtattttcggtagatggcctgctgcagaagataacggtgcgtatccacggtgatatctctagtttctggataaaaaacccggcgggagtttcccagggccaggaggaaggcggtggcccccttggacatacgcggcgatttggacagttctggatggtaacaatggacgaccccccacagacaggcacatgggagattcaggtaacagcggaagacacgccaggcgttagggttcaagcacaaacaagtctcgattttttattccatttcggtatacctatggaggacgggcctcacccaggcttgtatcctcttacccagcccgttgccggcctgcagactcagctattagtggaagtcaccggtctcggctctcgagccaacccaggagacccacagccacacttttcgcacgtcattcttcggggggtgcctgagggggcagagctgggtcaggtaccgttagaaccggtcggcccaccggagaggggcctcttagctgcctccctgagtccaaccctactttctacccctagaccctttagtttagagttgataggtcaagacgcggccggtcgacgattgcatagggctgccccacaaccctcaaccgtggtccccgtgcttctagagctttccggcccctccgggtttcttgccccaggaagcaaagtccctttatccctgcggatcgcgtcattttctggtccacaagacctcgacctgcgaaccttcgtgaatccttcatttagcctcaccagtaacttgtctagagcccatttggaacttaatgagtccgcatggggtcgcctatggttagaggtgccagactccgccgcccccgattcggtggtaatggttaccgtgactgcaggaggaagggaagctaatcctgttccccccactcacgcctttttacgtcttctagtaagcgctccagcccctcaagttaggaaccactactttccaagccaaggaccggcgcatcacccctataggttaatctag

SEQ ID NO: 15048 - RNA, 732 nt, synthetic construct
  misc_feature 1..732: note = source = /note="Description of Artificial Sequence: Synthetic coding sequence"
  source 1..732: mol_type = other RNA
atgggtcccgaagcactctcttctctgctgctgttgctgctggttgcttctggggatgccgacatgaaaggacatttcgatccggctaagtgccgctacgccctaggcatgcaggataggacaatccctgactcagatatttccgcctccagttcttggtcagacagcacagcggcccggcattccagactcgagtcatcagacggcgatggtgcttggtgccccgccggttcagtgttccccaaagaagaggaatacctacaagtagatcttcagaggctgcatttggttgctcttgtgggcacacagggtcggcacgccggggggttgggtaaagagttttcgcgttcatatcgcctaagatatagcagagacggacggagatggatgggctggaaggacagatggggacaagaggtcattagcggcaatgaagaccccgagggtgtggtattgaaggacttaggacccccgatggtagcacgcctagtacgattttatccacgggctgaccgggtcatgtctgtctgcctgcgcgtggagttgtatggatgcttgtggagggattgtagtatgggtgtttgggcctcctggcaaatggtatggtggggatggatgacactggggagagtgcgcagttgcggtagcgggcaggcaatgaccatgtgggatggcgcaacaacagcttctcccgtcgcaatgtggcggtggagcttaagtctgacaggctag

SEQ ID NO: 15049 - RNA, 2760 nt, synthetic construct
  misc_feature 1..2760: note = source = /note="Description of Artificial Sequence: Synthetic coding sequence"
  source 1..2760: mol_type = other RNA
atgggtcctgaagccttgagcagcctcctcctcctgcttcttgttgcctcgggtgacgcagatatgaaaggccattttgaccccgctaaatgccgctacgcccttggtatgcaggatcgcacgattcccgactccgatatcagcgcctcttcatcttggtccgattcaaccgcggcaaggcactccagactggaaagctccgacggtgacggagcgtggtgccccgccggtagcgtcttccctaaagaggaagagtaccttcaggtcgatctgcaacgtctgcacctcgtcgctctggtgggcacgcagggtcgtcatgcaggtgggctgggcaaggagttttccagatcatatagattgcgatactcacgtgatggcaggcggtggatggggtggaaggatcgctgggggcaggaagtaatttccggaaatgaagaccccgaaggcgtggtgctgaaggatctggggcccccgatggtagctaggttagtccgtttctatccccgagcagatcgggtaatgtctgtttgcttacgggtcgagttgtacgggtgtttatggagagatggtctccttagttatactgcacctgtagggcagacgatgtatctgagtgaggccgtgtatttgaatgacagcacatacgacgggcatacagttggagggttacagtatggggggttgggccaactcgccgatggagtggtaggtctggacgacttcagaaagagtcaggagctacgcgtgtggcctgggtacgattacgttggctggtcaaatcattctttctcatccggctacgtggagatggagttcgaattcgacagattgagagcctttcaggctatgcaagttcattgtaacaatatgcacactctcggcgctagattacctggaggcgtggagtgtagatttagacgaggtccagcaatggcgtgggaaggcgagcccatgcgtcataacttaggcgggaacctgggagacccgagagccagggccgtgtcagtgcccctcggcgggagggttgcaaggttcctgcaatgccgcttcctgtttgccggcccttggctactgttttcagagatttctttcatttccgatgtggtgaataactcctcccctgcacttggcggcacatttcctcctgccccttggtggcctccagggcctcctccaacaaacttctcatccctggaattagaaccacgaggacagcaaccagtggcgaaggcagaaggctcaccaactgctatactcatcgggtgtttagtggccatcatcttgctgttattacttattatcgccttaatgctctggaggctccattggcgaagactgcttagcaaggctgagaggcgtgtcttagaagaagaactcaccgttcacttaagcgtaccaggcgatactatattgatcaacaacagacccggcccacgcgaacctcctccttatcaggaaccgcgtcctaggggcaacccccctcacagcgccccctgtgtgcctaacggctccgcattattgctttctaatccagcatatagactgcttctggccacttatgcacgcccacccagagggcctggaccaccgacccccgcttgggcaaagcccaccaacacccaagcctattccggagactacatggaacctgaaaagccaggcgccccactcttgccccccccacctcagaactccgtcccacactatgccgaggctgacatcgtgacactacaaggggtgaccggtggcaacacatatgccgtccctgcattacccccaggggcagtaggcgatggcccaccacgcgtggacttccctcgatctagattgcgcttcaaggaaaagctcggggaaggacagttcggcgaagtccacctctgtgaagtggattcccctcaggatcttgtgagtttggactttcccctcaacgtgaggaaaggacacccactcctcgtggccgttaagattcttaggcctgatgccaccaaaaatgcttctttctctctcttctcaagaaatgactttctcaaggaggtgaagattatgagtagactcaaagatcccaatatcatcagactgcttggcgtctgcgttcaagatgatccactttgtatgattaccgactacatggagaatggtgacctgaatcagttcctctccgcccatcagctcgaagacaaggctgccgaaggcgctcctggagacggccaggcggcacagggacccactatatcttatcccatgcttcttcatgttgccgcccagattgcctctggcatgagatatctggccacattaaatttcgtccaccgcgacctagccacccgaaattgtctcgtcggagaaaactttactattaaaattgccgacttcgggatgtccaggaacttgtacgctggcgattactaccgcgtacagggccgcgctgtgctgccaattcgttggatggcttgggagtgcatccttatgggcaagtttaccacagcttctgatgtctgggcctttggggtcacgctctgggaggtcttaatgttgtgtagggcccaacctttcggccagcttactgacgagcaggtcattgagaacgcaggtgagttttttcgcgaccaagggaggcaagtctacttatctcggcccccggcatgccctcagggcttatatgaactgatgctgcgatgttggagtagagagtcggaacagagaccaccattctcccagctccatcgcttcctcgccgaagacgccctaaacaccgtatag

SEQ ID NO: 15050 - RNA, 2700 nt, synthetic construct
  misc_feature 1..2700: note = source = /note="Description of Artificial Sequence: Synthetic coding sequence"
  source 1..2700: mol_type = other RNA
atgctgctccttctgctgctagcacctctgtttctacgccccccaggagctggaggtgctcagacacccaacgctacttcagagggctgtcagatcattcatcccccttgggaggggggaattagatatcgggggctgacacgcgatcaggtgaaggccattaatttcctgcccgtggactatgagattgaatatgtgtgtagaggagaaagagaagttgtaggaccaaaagtgcgaaagtgtctggccaatggctcatggaccgatatggataccccaagtaggtgtgttaaccgaacacctcatagtgagagaagagccgtgtacattggtgccctcttccctatgtctggtggttggcctggtggacaagcttgtcagccagctgtcgagatggcactcgaggatgtgaactctagaagggacatcctgccagactacgagctgaaacttattcaccatgactcaaagtgtgaccccggtcaggccactaagtatttgtatgagcttttgtacaatgatccaatcaaaattattctcatgccaggatgtagctccgtatcgaccttagttgcagaggccgctaggatgtggaacctcatcgtacttagctacggctccagtagccccgccctctcaaaccggcaacgcttcccaacttttttcagaactcatcccagcgccactctgcataatcctacccgtgttaaattgtttgaaaaatggggttggaagaaaatcgctactatccagcaaaccactgaggttttcactagcactctggacgatcttgaagaaagggtgaaagaagcaggtatcgagattacatttcggcagtccttcttttccgaccctgcggttcccgttaaaaaccttaaacgacaagacgcaagaattatagtgggtctgttctacgagactgaggccagaaaggtgttctgcgaggtgtacaaagaaagactgtttggaaaaaaatacgtgtggttcctcatcgggtggtacgccgataactggttcaagatatatgatccttccatcaattgcacagttgacgagatgaccgaggctgtggaagggcacattacgacggaaattgtcatgctaaatccagcgaatacaaggtcaatctctaacatgacaagtcaggagtttgtggaaaaattgacaaagaggctgaaacgacacccagaggaaacgggcgggttccaagaagcgccattggcctacgatgcaatttgggcactggctctcgcgcttaataagacgtctggcggcggaggcagaagcggcgtacggctcgaggatttcaactacaataaccagacaattaccgaccaaatttaccgagcaatgaatagtagctccttcgagggggtgtcaggacacgtggtatttgacgcatcaggaagtagaatggcctggactttgatcgaacaactgcaggggggatcctacaaaaagatcgggtattacgattccacaaaggacgatctgtcatggtctaagactgataagtggattggtggaagccctcccgcagaccaaacactcgtaatcaagacctttcgctttctctctcaaaaactctttatttccgtgtccgtcctgtcatctctcggtattgtcctcgctgttgtctgtctgtcattcaacatatacaactcacatgtgcgctatatccagaacagccagcccaacctcaataatctgaccgccgttgggtgctcactggctctggctgctgtttttcccctggggttagacggctaccacataggccgaaaccagtttccctttgtctgccaggcaagattgtggttactcggcctgggcttcagcctcggatacggttccatgttcacaaaaatttggtgggtccatactgtctttaccaaaaaagaagagaagaaggagtggaggaaaacgctcgagccctggaaactttacgccaccgtgggtctactggtaggaatggatgtcttaaccctcgccatctggcagatcgttgaccctttgcaccgcaccatagagactttcgccaaagaagaacccaaagaagatatcgacgtgtcgatccttccacagttggagcactgctcatctcggaagatgaatacctggctcggaatattctacggatataagggactactcctcctgttggggatcttcttagcttacgagactaaatccgtttccacagagaagataaatgatcatcgggccgtaggcatggcaatttataatgtcgctgttctctgtctcatcaccgcccctgtgaccatgatcctttccagtcagcaagatgcggctttcgcattcgcttcattagcaatcgtgttcagttcctatatcactctagttgtgttatttgtgcccaagatgagaaggttaattaccagaggagagtggcagtcagaagcacaagatactatgaagacaggatccagtaccaataacaatgaagaagagaaatcacggctgctggagaaggaaaatcgcgaactggaaaagattatcgcagaaaaggaggaacgggtctctgaattgcgtcaccaactgcagagcaggcagcagctgaggagcagaaggcatccccctactcccccggaaccttccggaggtctaccccgcggaccccccgaaccgcccgatcgcctttcatgtgacggttccagagtccacctgctgtacaagtag

SEQ ID NO: 15051 - RNA, 447 nt, synthetic construct
  misc_feature 1..447: note = source = /note="Description of Artificial Sequence: Synthetic coding sequence"
  source 1..447: mol_type = other RNA
atgcaaacctttcccgttgccggagccctggatcctgccatccttgacacaagttccccccaagccctttacacagtcttgttaattgtgctcgtgatgatgtcactggttttcggaaagttcgtgcccgtcaactgggaaccaccacaacccctgccctttcccaaatatctaaggtgttacagatgtcttctcgagaccaaagagcttggatgtctgcttggttcagacatatgcctaacacctgctggatcaagctgtatcacactccataagaaaaacagttcaggtagcgatgtgatggtttccgattgtcgctcaaaagagcaaatgtccgactgcagcaatacacgaacctcacctgtgtccgggttctggattttttctcaatactgtttcctcgacttctgcaacgatcctcaaaaccgaggcctttacaccccgtag

SEQ ID NO: 15052 - RNA, 516 nt, synthetic construct
  misc_feature 1..516: note = source = /note="Description of Artificial Sequence: Synthetic coding sequence"
  source 1..516: mol_type = other RNA
atgagacacaatttaggaggtaacttgggcgacccaagggctagagcagtttccgtgcctctgggcggacgggtagccagatttctccaatgtcgcttccttttcgcaggcccctggctgctcttttctgaaatctcctttatatccgatgtcgtgaataactcctcacccgcactcggaggcacttttccacccgcaccttggtggccgcccgggccaccgccgactaacttttcatctctcgagctggaaccacgaggccaacaacctgtcgccaaggccgaaggcagccctacagcgattcttattgggtgtctcgtggctatcatcctgctcctgctgctgataatcgccttaatgttgtggcgcctccactggagacgcttgctttccaaagtactcgagtctcaccctcgtacacgaagcccaggactagtgggtattagaccgacccctctgcctgtttctcccatggctctggtccacttatgcgaagtcgacagccctcaggactag

SEQ ID NO: 15053 - RNA, 666 nt, synthetic construct
  misc_feature 1..666: note = source = /note="Description of Artificial Sequence: Synthetic coding sequence"
  source 1..666: mol_type = other RNA
atgaccacacagttacgtgtcgtgcatttgttgcctctcctcttagcatgtttcgtgcagacatccccaaaacaagagaaaatgaagatggattgtcacaaagacgaaaaaggtaccatttatgattatgaagcaatagctctgaacaaaaacgaatatgtgtcatttaaacaatatgtgggtaagcacattttgttcgtgaacgtggcaacatactgcggactgacagcacaataccccgaactgaacgctctccaggaagagctgaaaccttacggcctggtagtcctcggctttccttgtaaccagtttggcaagcaggaacctggcgataacaaagagatactgcccggccttaagtacgttagacccggcggcggattcgtgccgtcattccagctcttcgagaaaggtgacgtcaatggagaaaaggaacagaaggttttcagctttttgaagcattcctgcccacacccctcggagattctgggaacatttaagtcgatttcctgggacccagtaaaagtgcacgatattagatggaattttgaaaagtttttagtaggccccgatggcatcccggtcatgcgatggagtcacagagcaactgtgtcgagcgttaaaacagatatcctggcctacctaaagcaattcaagactaagtag

SEQ ID NO: 15054 - RNA, 447 nt, synthetic construct
  misc_feature 1..447: note = source = /note="Description of Artificial Sequence: Synthetic coding sequence"
  source 1..447: mol_type = other RNA
atgcagacctttccagtcgcaggtgcactggacccagctatactggacacaagttcaccacaggccctctataccgtgttactgattgtcctcgtgatgatgagtctcgttttcggaaaattcgtgcccgtcaactgggagcctcctcaacctctgccctttcctaaatatcttaggtgctatcgatgcctcctggaaaccaaagagctgggctgcctcttgggctcagacatctgcctcacccctgcaggttcaagctgtattacacttcataagaagaactcatccggttcggatgtgatggtgagcgactgtcgctccaaagaacagatgagtgactgttccaacacacgcacttccccagtttcaggattttggatcttttctcagtactgttttctcgacttttgtaatgaccctcagaaccgcggtttatataccccttag

SEQ ID NO: 15055 - RNA, 1737 nt, synthetic construct
  misc_feature 1..1737: note = source = /note="Description of Artificial Sequence: Synthetic coding sequence"
  source 1..1737: mol_type = other RNA
atgctcttgctcctgctgttagctcctttgttccttagacctcccggtgcaggtggggcccaaactcctaatgcgacgagcgaagggtgccagataatccacccaccatgggaaggcggcatcaggtaccgcgggctaacacgagatcaggtgaaggcaattaactttctgcctgtcgactatgaaattgaatatgtgtgtagaggagaaagagaggtggtgggcccaaaagttcggaaatgcttggcaaatgggtcctggacggatatggacaccccttctagatgcgtaagaatatgcagcaagagctacctaacgctcgagaatggaaaagttttcctcactggcggggatctcccagccttagacggagcaagagtagattttcgctgcgatcctgactttcacttagtgggctcctcacgctccatatgttcacagggacagtggtccactcccaaaccccactgccaggttaataggaccccacacagcgagcggcgtgcagtgtacatcggggcattgtttcccatgagcggcgggtggcctggcggccaagcttgccaacccgcagtcgaaatggcactggaggatgtaaattcccggagagatatcctgcccgactacgagctgaagctaattcatcacgactctaaatgcgatccaggccaagcgactaaatacttgtacgaactgctgtacaatgaccccatcaaaatcattctcatgccaggttgttcttcagtaagcactctggtcgccgaagcagctcggatgtggaacttgattgtactatcttacggttcttctagccccgccctgtctaatcgtcagagattccctacctttttccggacacatccaagcgcaacgcttcacaaccccacgcgtgtcaaactgttcgagaagtggggatggaagaaaatagcaacgattcagcaaactacagaggtgtttacctctaccctcgatgacctagaagagagagtaaaagaggccggcatcgaaataaccttcagacagagctttttctcagaccctgctgttcccgttaagaatctgaagcggcaagatgcccgtatcatcgtcggcctgttctacgagacagaggcaagaaaggtattttgtgaggtgtataaggagcgtctgttcggcaaaaaatacgtttggttcctgataggttggtacgcagacaattggtttaaaatttatgacccaagcatcaattgtactgtggacgaaatgaccgaggcagtggaggggcacatcaccacggagatcgtaatgctcaatccagccaacactagatccatctctaatatgacttctcaggagtttgtagagaagctcactaagcgcttaaaaaggcatccggaggaaacaggagggtttcaggaggcaccccttgcatacgacgcaatctgggcgctggctctcgctctcaacaagacatcaggtggcggtggaagaagcggcgtaaggttagaggactttaactacaataatcagaccatcacagatcaaatttacagagctatgaactcgtcttctttcgagggtgttagtgggcatgtggtgtttgacgcctctggcagcagaatggcctggacactgattgaacaattgcaaggtggatcatataagaagatagggtattatgatagcacgaaagatgacttatcctggtccaaaactgataaatggatagtgatcagtaggacacactcaccaacctag

SEQ ID NO: 15056 - RNA, 1737 nt, synthetic construct
  misc_feature 1..1737: note = source = /note="Description of Artificial Sequence: Synthetic coding sequence"
  source 1..1737: mol_type = other RNA
atgctgctgttactgctccttgctcctctctttcttcgcccacctggcgcaggcggcgcacaaactcccaatgcgaccagcgagggatgccagatcatccaccccccctgggaaggaggaatcagataccgcggcttgactcgggaccaagtgaaggcgataaatttcttgcccgttgattacgaaattgaatacgtttgtaggggtgaaagggaagttgttggaccgaaggttagaaagtgcctggccaatgggtcatggacagacatggacacaccaagcagatgtgtgcgaatctgtagcaaaagctatcttacactcgaaaacggcaaagtcttcctgacaggcggggacctgccagctctagacggcgctagggtagatttccggtgcgacccagactttcatctcgttggctcaagccgctccatttgctctcaaggtcagtggtcaacccccaagcctcattgtcaggtcaaccgtacacctcactcagagagacgagccgtatacattggcgcgctgttccccatgagcgggggttggccaggtggccaggcatgtcaacctgccgtagaaatggccctagaagatgtgaattcccgcagagacatcttgccagactacgagttgaagctgattcaccacgatagcaaatgtgaccccggtcaggccactaaatacctttacgaactactttataacgatcctatcaagattatcctgatgcctgggtgctccagcgtatccacgcttgtggctgaagccgccaggatgtggaatcttattgttctatcgtacgggtccagttctccggccctctctaatcgacagcgttttcccaccttttttagaactcatccgtccgccaccctgcacaaccctacacgagtcaagctctttgagaagtggggatggaagaaaatagctaccattcagcaaactacggaggtatttacgtccactctagatgacttagaggaaagggtaaaggaggcaggaatcgagataacgtttcggcagtcattttttagcgatcccgcagttccagtcaaaaacctcaagagacaagacgctcgcatcattgtaggcctattttacgaaaccgaagctcggaaagtgttttgtgaagtttataaggaacgtctattcgggaagaagtacgtctggttccttatcggatggtatgcagacaactggtttaaaatctatgatccatccatcaactgcactgtcgatgaaatgacagaggccgtcgaagggcacatcacaactgagattgtaatgctgaatcctgccaacacccgatctatctccaacatgacgtctcaggaatttgtcgaaaagctcacaaagaggctgaagagacacccagaagagaccggcggctttcaagaggctccactggcatacgacgcaatatgggcactcgctctcgccctgaacaagacatcaggcggtggtggtcggagcggagttcgcctggaagacttcaactacaacaatcagacaattacagatcagatctatcgcgcaatgaactccagcagttttgagggtgtaagcgggcatgtcgtgttcgacgcctctggttccagaatggcctggaccttaattgaacaattacagggaggaagctacaaaaagattggctactatgactcgactaaagatgacctgtcatggtctaagaccgataaatggatcgtgatttctagaacccactccccgacctag

SEQ ID NO: 15057 - RNA, 756 nt, synthetic construct
  misc_feature 1..756: note = source = /note="Description of Artificial Sequence: Synthetic coding sequence"
  source 1..756: mol_type = other RNA
atgccacacctcgcctccctctttaccgcgtcctcacgatgctgcccacaccctcttagacccgaaggatccggcgcaatggggcctgaagccctttcctcacttttacttctgcttctggttgcctctggtgacgctgatatgaaaggacactttgatcctgccaagtgtcgctatgctctgggaatgcaggaccgaaccatacctgactctgatatcagtgcctcctctagctggagcgactcaaccgcagcgcggcactctaggcttgagtcctcagacggtgacggcgcttggtgccccgctggctcggtatttccaaaggaagaggagtacctccaagtggacctccagagattacatcttgtggctcttgtgggcactcaagggcgtcacgcaggtggtttgggcaaagaattttccagatcatataggcttcgatacagtagagatggtaggcgatggatggggtggaaggacaggtggggacaggaagtgatcagtggtaacgaggacccagagggcgtggtgcttaaggatctgggaccgccaatggtggctagactggtgcggttttatccgagggccgatcgggtgatgtccgtgtgtttaagagtggaactgtacggctgcctgtggaggggcgaatggctaagcttcttgggaatatgttttttgtctagggggcttgaaggcggggaatgcggtgagtgggcttctcgcataccatctccggctgggaagttgagtttgtag

SEQ ID NO: 15058 - RNA, 1764 nt, synthetic construct
  misc_feature 1..1764: note = source = /note="Description of Artificial Sequence: Synthetic coding sequence"
  source 1..1764: mol_type = other RNA
atgaggcccaggggtctccctcctctcttagtcgtgttacttggctgttgggcaagtgtgtcagcccaaactgatgctacgcctgccgtcactactgaaggactgaactcaactgaggctgctctggctaccttcggcacttttcctagcacacgaccaccaggaacaccacgtgcccccggccccagctctggcccaagacccacgccagtgaccgatgttgccgtcctctgcgtatgcgacctctccccggcacagtgcgatatcaattgctgttgcgatcccgactgttcttctgtggacttttccgtttttagcgcttgctcagttcccgtcgttactggagactcgcagttctgctctcagaaagccgtaatttactccctcaattttactgccaatccaccccagagagtctttgaactggttgatcagataaatccgtccattttctgcatccatatcactaactacaagccggccctatccttcattaaccctgaagtgcccgacgaaaataactttgacacccttatgaaaacctcagatggatttacgctgaacgcagaatcctatgtttctttcaccacaaagctggatattccgaccgccgcaaaatatgaatatggcgtgccccttcagaccagcgacagttttcttagattccccagctccttgacatctagcttgtgcacagataacaacccggccgcgttcttggtgaaccaggcagtgaaatgtaccaggaagatcaaccttgagcaatgcgaagaaattgaggccctatcgatggcattttactcgtctcccgagatcctgcgggttcctgactctcgcaaaaaagtacctattacagtccagtctatcgtaatccagtctctgaataaaaccttgacgaggcgcgaagatacagacgtcctacagccaacccttgttaatgctggtcatttctctctgtgcgtcaatgtggtgctcgaggtgaaatactcgctgacatatacagatgccggcgaagtgactaaggcggatctgtcctttgttttgggaactgtgtcatctgtggtggtgcctctgcagcagaagttcgaaatccatttcctccaggaaaatacccaacccgtgcccctctctggaaaccctggttacgtcgtaggcctgcctcttgccgccggtttccaaccacacaaaggatcagggatcatacaaactactaacagatacggacagctgaccatacttcacagtaccacggaacaggactgcctggcactggagggggtgcggaccccagtgttatttggatatacaatgcagagcggatgcaagttaagactgaccggggcacttccctgtcaactcgttgctcagaaagtaaagagtcttttatggggccaaggctttccagactatgtcgctccctttggtaactcgcaggcccaggatatgctcgattgggtcccaattcattttatcactcaatctttcaatcggaaagatagctgtcaactgccaggcgcgctggtaattgaagtcaagtggacaaagtacgggagcctcctgaacccccaggccaagatcgtgaatgtaaccgccaatctcattagctcaagttttcccgaagcgaactccggtaacgaaagaactatcctgatctcaaccgcagtcacctttgttgatgttagtgctcccgccgaagctggctttcgagctccccccgccatcaacgcccgattacctttcaattttttcttccctttcgtatag

SEQ ID NO: 15059 - RNA, 2067 nt, synthetic construct
  misc_feature 1..2067: note = source = /note="Description of Artificial Sequence: Synthetic coding sequence"
  source 1..2067: mol_type = other RNA
atgctgcctaccgaagtccctcagagccatcctgggccgagcgctctactcctcctccagctgcttctcccccctacctctgcttttttcccaaatatctggtcattattggccgcccccggctccataacgcatcaggatctcacagaggaggccgctctcaacgtcaccctgcaactctttctcgaacagcctcccccaggccgaccccctttgaggctggaggatttccttggaagaaccctcttagccgatgatctgttcgcagcatattttggacccggatcttctcggaggtttcgcgctgccctgggtgaggtctcaagagcgaatgctgcgcaagattttctaccgaccagcaggaacgacccggatttacacttcgacgctgaaagattgggacagggacgggcacggttggtgggagctcttagagaaacagtcgttgcagctcgcgccctagaccatacgcttgcacgccagcggcttggagctgcacttcacgctctgcaagatttctattctcattctaattgggtggagctgggcgaacagcagcctcatccccatctgttatggcctaggcaagaacttcagaatctcgctcaggttgcagatcctacttgttctgactgtgaggaattgagttgcccacgaaactggcttggattcacactgttgaccagcggttacttcggcacccacccccccaaaccccctggaaaatgctcacacggcggacatttcgatagaagcagtagccagccacctcgtggagggattaacaaggattctacctcccctggttttagtccccaccacatgttgcacctccaggccgctaagctcgcactactggcatctattcaggcgttttctctgctgcgttcaagacttggggatcgtgacttcagtcgactgctggacatcacacccgcttcatctctgagcttcgtattggatacgaccggatcaatgggtgaagagatcaatgccgccaagatacaggccagacacctagttgaacagcgcagagggtctccaatggagccggttcattatgtgctcgtccccttccacgaccccgggttcggtcctgtttttactacttcagatcccgactctttttggcagcaattaaacgaaatacacgccctcggggggggcgatgaacctgagatgtgcctgtcggccctgcaactcgcacttttacacacaccacccctttcggatattttcgtgtttaccgacgcctcacccaaagacgcttttctcacaaatcaggtggagtcacttactcaggaacgcaggtgcagggtaacatttttggtgaccgaggacacttcccgagtgcaaggacgagccagacgcgaaatactctccccactaagatttgaaccatacaaggcagtggccctggctagcggaggagaggttatcttcactaaggatcaacacatcagagatgtggccgccattgtgggggaaagcatggctgcgcttgtgaccctgccactggacccaccagttgttgtcccagggcaaccactggttttttcagtcgatggactgcttcaaaagattaccgtcagaatccacggggacatcagttccttctggattaagaatcccgccggagtaagtcaaggacaagaggaaggcggaggacccttgggtcatacacgaagattcggacagttttggatggttacgatggatgaccccccccaaaccggtacttgggaaattcaagtgactgccgaggacacaccgggcgttagggtacaggcccagacctccctcgacttcctgttccactttgggatcccaatggaggacggacctcaccctggcctgtaccctcttactcagcccgtcgctggacttcaaacccaactgctggtcgaatcccaatcttggggctcttctgcagccttcctgccgagacatccttcaagagggccacggggttgtcgtaccagacccggtgccctaggtgctcgcggtacctccggcgccagatctcctagaagcctcgccgtcgcacatgcggctgtccacccctag

SEQ ID NO: 15060 - RNA, 303 nt, synthetic construct; identical to SEQ ID NO: 13421
  misc_feature 1..303: note = source = /note="Description of Artificial Sequence: Synthetic coding sequence"
  source 1..303: mol_type = other RNA

SEQ ID NO: 15061 - RNA, 705 nt, synthetic construct
  misc_feature 1..705: note = source = /note="Description of Artificial Sequence: Synthetic coding sequence"
  source 1..705: mol_type = other RNA
atgaagacgctggccggccttgtgctaggcctggttattttcgatgccgccgtcactgctcctacactcgagtccattaactacgattcagaaacatatgatgcaacattggaagacttggacaatctgtacaattacgaaaacatcccggtcgacaaagttgagatagagatcgccaccgtgatgccttcaggaaatagagagctgctcacaccgccaccccagccagaaaaagcccaagaggaagaagaggaagaggaatctacaccacgacttatcgatggatcctcaccccaagagcccgaatttaccggagttctcgggcctcacaccaatgaagacttccctacttgtctgctgtgtacttgcatatcaactacagtctactgcgacgaccatgaactggatgccatcccccctcttccgaagaacactgcttatttttactcacgcttcaatcgcatcaagaagattaataaaaatgatttcgcatctctttctgatctaaaaaggattgacttgacttctaatctgatctcagagatagacgaagatgcatttagaaaactgccccagcttcgcgagttggttctacgagacaataagattagacagctccctgaactaccaacaacacttactttcattgatatcagcaacaatagacttggacggaagggtattaagcaagaggccttcaagtag

SEQ ID NO: 15062 - RNA, 2559 nt, synthetic construct
  misc_feature 1..2559: note = source = /note="Description of Artificial Sequence: Synthetic coding sequence"
  source 1..2559: mol_type = other RNA
atgttgccaactgaagtaccacagtcacatccaggaccctccgccctgctcctcctccagctgttactccctcccacaagtgcgttttttcctaatatttggtccctacttgccgctccaggcagtatcacacatcaagacctgactgaagaggccgccctaaatgtcacactgcaactgtttctggaacagccaccccccgggaggccccccctgaggctggaagactttttgggacgaacccttctcgccgatgacttgttcgctgcctacttcggacctggctcctcgagaaggtttagagccgcccttggggaagtttctcgggctaacgccgctcaggacttcctgccaaccagtagaaacgatcctgatctgcatttcgatgccgagcgactgggacaagggagagcacggctcgtcggcgctttgagagagactgtcgtggctgctagagccttagatcacactcttgcgagacagcgtctgggcgcggctttgcatgcattacaagatttttatagccactccaattgggtagagctcggagagcaacagccgcatcctcatctcctttggccacgtcaagaacttcaaaacttggcccaggttgctgacccgacttgctccgattgcgaagaactgagttgccccagaaattggctaggctttacattgcttaccagtggctactttgggacccacccgcccaaaccaccaggaaagtgctcccatggcggacatttcgatcgctccagctcccagcctcccagaggtggcataaacaaggactccacatcacctgggttcagtccacaccacatgctccacctgcaagccgcaaagcttgcgttgttagcaagtattcaagcatttagccttctaaggtctagacttggcgacagagacttctcgagactattagatatcactccagccagcagcctctccttcgtgcttgatactaccggctctatgggcgaggaaattaacgctgcaaaaatccaggctcgtcatcttgtggagcagcgcagaggaagtcccatggagcccgttcactacgtcctggtgcccttccacgatcccggctttggccctgtattcaccacatcggacccagattccttttggcagcaactcaatgaaattcacgccttgggagggggggatgaacctgagatgtgtctttccgctttgcagctggctcttttacacaccccaccattatcagacatattcgtgttcactgatgccagccctaaagatgctttcctgaccaaccaggtggaaagtctgacccaggagaggaggtgccgagtcacctttctggtaactgaagacaccagtcgcgtacaaggccgggctagaagagaaatcctctctccattacgctttgagccctataaagccgtagccctcgcaagtggtggcgaagttatatttaccaaggatcaacatatccgtgacgttgccgcaatcgtgggcgagtccatggcagccctagtaaccctcccactagacccacctgtcgtcgttcccggccagcccctggtattctccgtggacggactgttgcagaaaattacagttaggattcatggcgatattagtagtttttggattaaaaacccagcaggcgtgtcccaaggacaagaagaaggaggaggtccgcttggacacacgaggcgattcggccagttctggatggttaccatggatgatccgccccagaccggcacctgggagattcaggtcacagccgaagacaccccaggcgtgagagtccaggcgcaaacatccctggacttcctattccattttggcattcctatggaagatggacctcaccccgggttgtatccacttacacagccagttgccggcctccaaacacaattactagtagaagtcactggtctcggttcacgcgctaaccctggcgatcctcagcctcacttctcccatgttatcctccgaggggtcccagaaggggccgaactggggcaggtcccactggagcctgttggaccacccgaacggggtctgctggccgcgtcgctgagccccacactgctttcaacacctagacctttctccctcgaactcatcgggcaggatgcagccggcagacgcttgcatagggctgcccctcagcccagtaccgtcgtccctgttttactagaattgtccgggccttctggcttcctcgcccctggatctaaagttcctctgtcccttagaatcgccagttttagcggtcctcaggacctcgacctccgcacatttgtgaacccttctttctccctgacatccaacctctctcgggcccatcttgaacttaatgagtcagcatggggtcgactatggctcgaggtgccagattccgccgcaccagacagcgttgtaatggtaacagtcaccgctggcggcagagaagccaatccagttcccccgacccatgcatttctaaggctgttagtctcagctccggcaccccaggtaaggaatcactactttccgtctcagggccccgcacatcacccctataggctaatttag

SEQ ID NO: 15063 - RNA, 2760 nt, synthetic construct
  misc_feature 1..2760: note = source = /note="Description of Artificial Sequence: Synthetic coding sequence"
  source 1..2760: mol_type = other RNA
atgggccctgaagctctttccagtctgttgcttttgctcctggtggcctcaggagacgccgatatgaaaggacatttcgaccccgctaaatgccggtacgccttgggcatgcaggaccgcacgatcccggacagcgatataagtgctagctcttcctggtccgactctaccgccgctcgacatagccggcttgaatcaagtgatggcgatggagcatggtgccccgctgggagcgtatttccaaaggaagaagagtatctacaggttgacctgcagcgattacatctggtcgcgctcgttggaacccagggccggcatgcgggtgggttaggaaaagagttctcccgctcatacagactcaggtactctagagatggtcggcgatggatgggatggaaagaccggtggggacaagaggtgattagtgggaatgaggaccccgaaggagttgtgctgaaggaccttggaccccccatggtggcccgccttgttcgattttatcctagagcagacagagtgatgagcgtgtgcctgcgagtggaattgtacggttgtctctggcgggatggtttgttgagctatactgcaccagtgggccagacaatgtatttatctgaggcggtgtatctgaacgactctacttacgatggacacacagtgggtggcctgcagtacggaggactcgggcagttagccgacggagtggttggcctcgatgactttaggaaatcccaggagctgcgggtatggccaggctatgactatgtcggatggagcaaccacagcttttcctcaggatatgtggaaatggaattcgaatttgacagactgcgcgctttccaggccatgcaagtgcattgcaacaacatgcatacactgggagcaaggctgccaggcggggtcgaatgccgtttccggaggggtccagccatggcatgggaaggagaacccatgcgccataatctgggaggcaaccttggtgacccaagggccagagctgtgtccgtgccactgggcggacgggtggctcgtttcttgcagtgtagattccttttcgctggaccctggctcctgttttccgaaatatcattcatttctgacgtcgtcaataactcctcacctgctctcggaggcaccttccccccggccccttggtggcctcccggccccccgcccactaacttcagcagcctcgaactggaacctcggggccagcagccagttgctaaggctgaaggatcaccaaccgcaatactgattggatgtctagtggcgattatactgcttcttttgcttattattgccttgatgctctggcgattacactggcgacgcctcttaagtaaggccgaacgacgagtcctagaggaagaattaaccgtgcacctaagcgtcccgggcgacactatcctaatcaataatcgcccaggcccccgggagccccccccttaccaagaacctagacctcgtggaaacccccctcattcagcaccatgcgtgcctaacggcagcgctctgctcctctcaaacccagcataccgccttttactggccacctacgcacgccctcctaggggacctgggccaccgactcctgcttgggccaagccaactaatacccaggcatacagcggggactacatggaaccggaaaagccaggtgccccacttttaccccctccacctcagaacagcgttccacactatgccgaggcagacatcgtaactcttcaaggcgttaccggaggaaatacatacgccgtacctgcgcttccccctggcgccgtgggagatggccctccccgagtcgacttccctaggagcagattaaggtttaaagaaaagctgggggagggacagtttggtgaggtgcacttgtgcgaagtagattctccccaggacctggtgtctctggattttccactgaatgtgagaaaagggcacccactgctcgtggcagtaaaaatcctacggccagatgccacaaagaacgctagctttagcctgttctcccgcaacgatttcctgaaagaggttaaaattatgtctcgactgaaagaccccaacatcatccgtctcttgggtgtttgcgtccaggatgaccctctctgtatgattacagattatatggaaaacggagacttgaatcagtttctttccgcacatcaactggaggacaaggctgcagagggtgcccctggggacggtcaggccgcacaaggtccaacgatatcttatcctatgttactgcacgtggccgcacagatcgcgtctggcatgcgctacctggcgacactgaattttgttcaccgtgacctagccaccaggaactgtctcgttggagagaattttactatcaagatcgccgacttcgggatgtctagaaacttgtacgctggggattactatcgcgtgcaaggaagagccgtgctaccgattagatggatggcctgggagtgcatactgatgggcaaattcaccaccgcatctgatgtgtgggcatttggcgttacactttgggaggtcctcatgctgtgccgcgcacaaccctttggccaactgactgacgagcaagttattgaaaacgccggagaattttttcgagatcagggacggcaggtctatctctcaaggccacccgcctgcccccaaggactgtacgaattgatgctgcggtgttggagtcgggagtcggagcaacggccccccttttcccaactccacaggttccttgccgaagatgctctcaataccgtttag

SEQ ID NO: 15064 - RNA, 1737 nt, synthetic construct
  misc_feature 1..1737: note = source = /note="Description of Artificial Sequence: Synthetic coding sequence"
  source 1..1737: mol_type = other RNA
atgttactactcctgctcttggcccccctttttttaagaccccccggagcaggcggcgcacaaacccccaatgcgacctcagaaggatgtcaaattattcatccaccttgggagggtggcatcaggtaccggggactgacacgggatcaggtgaaggccatcaatttcctgccagttgattacgagatcgagtatgtttgccgcggcgagcgagaagtagtgggaccaaaagtgcgcaaatgcctcgccaacggatcatggacggatatggatactccatcgcgttgtgttcgcatatgtagcaagagttatctcacactagagaacggaaaggtctttttaaccggcggcgacctgccagctttagacggtgccagagtcgattttcgttgcgatccagacttccatctggtgggcagcagccgaagtatatgttcccaaggacaatggagcacccctaaaccccattgccaagtgaatcgaacaccccactccgagagacgggctgtgtacataggagctctcttccccatgtcgggcggttggcccggtggccaagcgtgccagccagccgtagagatggccctggaggatgtgaacagtcggcgcgacattttgccggattacgaactaaagctgattcaccatgatagcaagtgtgaccctggccaggccactaaatacctctatgaactactgtataatgatcctataaaaattattctgatgcccggttgctcttctgtttctaccctagtagccgaggcggcaaggatgtggaatctgatcgtactctcttatggctcctcttccccagccctctcaaatcggcaacgcttccctactttctttcggactcatccctctgctacccttcataacccgacgcgcgtaaaacttttcgaaaagtggggatggaagaaaatcgcaactatccagcagactacagaagtgtttaccagtacattagacgacctcgaagagagagttaaggaagccggcatcgaaattacttttcggcagtcatttttcagcgatccagccgtacccgtaaagaatctcaagcgccaggacgctcgaattattgttggcctcttttacgagactgaagcccgtaaagtgttttgtgaagtttataaagagcgactgtttggaaaaaaatacgtgtggttcctcatagggtggtacgcagataactggttcaagatctatgaccccagcattaattgcactgtggatgagatgaccgaagccgtggaaggacacattaccaccgaaatcgtgatgttgaaccccgccaacactagatccatcagcaacatgacatcccaagaattcgtcgagaaactgaccaagagactaaagagacatccagaagagacaggcgggtttcaggaggcaccacttgcctatgatgccatctgggctctagctttggcactgaacaagaccagtgggggcggcggaagatcgggggtgagactggaggactttaattataataatcagactatcaccgatcagatttatagagccatgaattcctcttcatttgaaggcgtttctggccacgtggtttttgatgcatccggctcgcgtatggcttggacactgatcgagcagcttcaagggggcagttacaaaaaaataggatactatgactctaccaaggacgacctgtcttggtctaaaacggataaatggattgtcatatcacgaacccactctcccacgtag

SEQ ID NO: 15065 - RNA, 516 nt, synthetic construct
  misc_feature 1..516: note = source = /note="Description of Artificial Sequence: Synthetic coding sequence"
  source 1..516: mol_type = other RNA
atgagacacaacctcggaggaaacttgggcgaccctcgagcccgcgccgtttccgtgcccctcggtggtagagtcgcgaggtttcttcagtgtcggttcctcttcgcaggcccttggctcctcttctcggaaatttctttcattagcgatgtggttaacaactcgtctcctgccctcggcggcacttttccccctgccccatggtggccccctggccccccaccgactaatttttcaagccttgagctggagccccgcggacagcagcccgtcgcaaaggctgaaggcagtccaactgcaattctaataggctgcctcgtggctatcatcttgctccttctgctgatcatcgctctgatgctgtggcgcttgcattggcgcaggcttctgtcaaaagtattggaatctcacccccggacccgctctccaggattagttggtatcagacccacacctttacccgtctcccctatggcacttgtgcatctgtgtgaagtggattcaccacaggactag

SEQ ID NO: 15066 - RNA, 2067 nt, synthetic construct
  misc_feature 1..2067: note = source = /note="Description of Artificial Sequence: Synthetic coding sequence"
  source 1..2067: mol_type = other RNA
atgctcccaaccgaggtgcctcagagccaccccggaccgtctgccctgctcttgctccagctgctcctgccccccacatccgccttctttcctaacatctggagtctgctggccgcccccggttccattacacaccaagatcttactgaagaggctgccctgaatgtgaccctgcagctcttcttggaacagcctccacctggaagaccccctttgcgcctggaagactttttaggtcgtacactgctagctgacgatcttttcgccgcttactttggcccgggctcatctcgccgcttccgagcagccctgggagaggtctctagggcaaacgccgcacaggactttctccccaccagccgcaatgaccccgacctgcactttgatgccgaaagattaggacaaggacgcgcccggctagttggcgctttacgagagactgtggtagcggcaagagccctggaccacacgttggcacgccaaaggctcggagccgcgttacatgcgcttcaggatttttactcccactctaattgggtggagctcggagaacaacagccacatcctcacttactctggcctcgccaggaattacagaacctggcccaagtggccgatccaacatgctcagactgcgaggagcttagctgccctaggaactggctcggcttcaccctgttaacgtccggttacttcggcacacacccccctaaaccacctggcaagtgttcccacggtgggcacttcgacaggtcttcttcccaaccgcctagaggaggcatcaataaagatagtaccagcccaggattctcccctcaccacatgctccacttgcaagccgccaagttagcccttctcgcttctatacaagccttttctcttttgagatcgcgcctaggtgatcgagacttctcgagactcctggatatcacccctgcttcttcattgtcatttgtgctagacacaaccggctcaatgggcgaagagattaatgccgctaagattcaggcaagacacctggtagaacaacgacgcggatcccctatggaaccagtgcattatgttctcgtaccctttcacgatcctggcttcggtccagtgttcacaacatctgaccccgactccttttggcagcaactgaacgaaatccacgcgctaggaggaggagatgaacccgaaatgtgtttgtctgcactacagctggcactgctgcacacccctccactgagcgatatttttgtattcaccgacgcgtccccaaaagacgcgtttctaacaaatcaagtagagagtttgacgcaagagaggcgctgtagggttacattcttagtgaccgaagacacctccagggtgcaagggcgcgcaagacgagaaatattgtcccccctaaggttcgaaccatataaggccgtagctttggcatcgggcggcgaggttatatttactaaagatcagcacatccgagatgtcgcagctatcgtgggcgagtcaatggcagcccttgtaactctgcctttagacccccctgttgtcgtgccaggtcagcctctagtgttctctgttgacggccttttgcagaagattacagttcgcatccatggcgacatttcgagcttttggattaagaatccagccggagtttcacaaggacaggaagaaggtggcggtccacttggccacactcgccgtttcggacagttctggatggtgaccatggatgatcctccgcagacgggcacatgggagattcaggtgacggccgaagatacacctggcgttcgggttcaggcccagacctcgctggactttctttttcatttcggaatccccatggaggatggcccacaccccggtctttaccccctcactcagcccgtggcgggtctgcagacccaactgcttgtcgaatcacagtcttggggctcctccgcagctttccttccccgccacccaagcagaggcccaagaggctgtcgaacacgacccggagccttgggagctagaggaacgagtggagctcggagtccccgatcattggcggtagcccacgcagcagttcacccctag

SEQ ID NO: 15067 - RNA, 5097 nt, synthetic construct
  misc_feature 1..5097: note = source = /note="Description of Artificial Sequence: Synthetic coding sequence"
  source 1..5097: mol_type = other RNA
atgcgattactgtggggactcatctgggcatcttctttcttcacacttagcctgcagaagccacgcctgttacttttttccccttctgtggtgcacctcggtgtccctctgtccgtgggcgttcagcttcaagatgttccccgcgggcaagtggtcaaagggtcagttttcctgagaaaccctagtagaaacaacgttccatgcagcccaaaggtggattttaccttatccagtgagcgcgactttgcattgctgtcattacaggtgccactgaaagatgcaaaatcatgcggactccaccagttacttcgcgggcctgaagttcaattagtggcgcacagcccgtggcttaaggatagccttagtagaaccacaaatatccaaggtatcaatctcctctttagtagcagacggggccatctcttcttacaaaccgaccagcccatctacaaccctggccaaagagtgaggtacagagtctttgcactcgatcagaaaatgagaccctcaaccgacacaatcacagtcatggtggagaactctcacggcttgcgcgttcgaaaaaaagaggtttacatgccgagttcaatcttccaggatgacttcgtcatacccgacattagcgaacccggtacatggaagatttctgcccgcttctctgatggcttagaaagtaactcatctacccagtttgaggtaaagaaatacgtgctccccaactttgaggtgaagataacgcctggaaaaccatatattttaacagttcccggtcatctggatgagatgcagctcgacatccaggcccggtacatttacggcaaaccagtacagggagtggcatacgtgcgtttcggactcctagacgaggatggcaagaagaccttctttagaggactcgagtcccaaacaaagctggtcaatggccagagtcacattagtctaagtaaagccgagtttcaggatgccctggaaaaattgaacatgggcattacagacctgcagggcctaagactttatgtcgccgcggcaatcatagaataccccgggggtgaaatggaagaagccgaactgacctcttggtacttcgtgtccagtccttttagcctagatttgtccaagactaaacgccacctggtgccaggagcccccttcctcctccaagcactggtcagagaaatgagcggctcccccgctagcggtattcctgtgaaggtttctgctactgtctcctcaccaggctcagttcccgaagtgcaggacatccaacagaacactgatggctctggccaggtcagcataccaataatcatcccacagaccatttccgaactccagctgtcagtctcggccggaagcccacaccccgccatagcccgtctgaccgttgcagcccccccctccggtggacctgggtttctgtctatcgagagacccgattcaagacctcctagggtaggtgacacattgaaccttaacctccgagctgttggatctggcgccacattttcacactactactatatgatcctgagtcgaggccaaatagtgtttatgaatcgtgaacccaaaagaactctcacttcagtcagcgtctttgttgatcaccacctcgccccgagtttctacttcgtggccttttattatcatggcgatcacccagtcgcaaatagcctgcgagtcgatgtgcaagcaggagcttgtgagggaaaactggaacttagcgttgatggagccaagcaatacagaaacggagagagcgtgaagcttcatcttgagactgactctttggccctcgtggcactgggtgcactggacacagccctgtacgctgcaggatcgaagagccacaaacctctgaatatgggtaaggtgttcgaagccatgaattcctatgatttgggctgcggaccaggcggcggtgattccgctctgcaagtcttccaagcggctggtcttgccttcagcgatggcgatcaatggaccctctccagaaaaagattgagctgccccaaagaaaagacgactagaaaaaaacgtaacgtgaacttccagaaggccattaacgagaagctgggccaatacgcctcaccgaccgccaagcggtgctgccaggatggtgttactagattaccgatgatgcggtcctgtgaacaacgcgccgccagggttcaacaaccagactgtagggaaccatttctaagctgttgtcagttcgccgaatcgctgaggaaaaaatctagggacaaagggcaggcgggactgcagcgtgcgctagagatcctccaagaagaggacctgatcgacgaagacgacattcccgtaagatctttctttcccgaaaattggctttggagagtcgaaactgtggatcgatttcagatcctgacactttggctgccagacagcctaacaacttgggaaatacatggattgagcctgtccaagactaaaggtctttgcgtggcaaccccagtccagctccgtgtttttcgcgagtttcacttgcacctacgcctccctatgagtgtgcggcggttcgaacaactggaacttcggcccgtgttatacaactacttagacaaaaatctaaccgtttccgttcacgtttcacctgtggaggggctgtgtctcgcaggaggaggaggattagcccagcaggtcttagtccccgccggctcggcacgtccagttgcctttagcgtagtacccaccgctgcagccgcggtgtcactgaaggtagttgctcggggcagttttgaattcccagtcggggatgctgtgtccaaagtgctgcagatagaaaaggaaggcgctattcatcgggaagagcttgtttatgagttgaaccccctggaccaccgtggtcggactctagaaattcctggcaattctgaccccaatatgattccagacggcgattttaattcttatgtgcgcgtgaccgcgtctgatccactggacaccctcggatctgaaggagctttgtcccctggcggtgtggctagcctgttacgcttgccacggggttgtggggaacagacaatgatctatctcgctccaacattagccgcatcacgttaccttgacaaaaccgaacagtggtcaaccctcccccccgaaacaaaagatcacgccgtggacctcatacagaaaggttatatgcgcatacaacagttccgcaaggctgacggctcctacgcagcctggttgtctagaggcagttcaacctggcttactgcctttgtcctcaaggtgctgagccttgcccaagaacaggtaggcggctcacctgagaaacttcaagagacctctaactggctcttatctcagcagcaagcagacggctccttccaagacctatctcccgtgattcatcgaagtatgcagggaggattagtgggtaacgatgaaaccgtagctctcactgcctttgtgacaatcgcactgcaccacggtctggcagtttttcaggatgagggtgctgaacccttgaaacagcgggttgaagcctccatcagcaaggcttccagtttccttggcgaaaaggcatccgccggcctgctgggtgcccacgctgccgcaatcaccgcctatgctctgacactcacaaaagcgccagcagatctgcgtggcgtagcacacaacaacctgatggcaatggcacaggaaactggcgacaacctctattgggggagcgtgacgggcagccaatcgaatgcagtttctcctaccccagcgccccgcaatccatcagacccaatgccccaagcaccagccttatggatagaaacgacagcgtatgccctgcttcatttattgttacatgagggaaaagcagaaatggccgatcaggcagccgcatggctgacacggcagggtagcttccaaggtggcttccgctctacacaggataccgtcattgccctcgatgcactctccgcatactggatcgcttctcacactaccgaggaaagaggactgaacgttacgctgtcatctacaggccgcaacggattcaaatcacacgcccttcaacttaacaaccggcagatacgggggctggaagaagaactgcagttttctcttgggagtaagataaatgtaaaagtcggtggtaatagtaaagggacactaaaagtccttagaacctacaacgtcctcgatatgaaaaacactacctgccaggacttacagatcgaggttaccgttaagggtcatgtcgaatacaccatggaggccaatgaagactacgaggactacgagtatgatgaattgccagcaaaagacgacccggatgcccccttgcagcccgtgacccccctgcagttgttcgaggggagaaggaacagacgcagaagggaggctccaaaactaaccagcctgtctgaccgatacgtaagccacttcgagacagagggccctcacgttctcctatatttcgactcggtgccaaccagtagagagtgtgttggattcgaagcagtgcaagaagtccctgtgggtctcgtgcaaccggctagcgcaactctctatgactattataaccccgaaagacgttgttcagttttttatggagctccatccaaatcccggctgttggcaacattgtgctcagcagaagtttgtcagtgtgcggaaggtaagtgtccgagacagagaagagctctggagaggggcctgcaggatgaggatggctaccgtatgaagttcgcatgctattatccaagagtggaatatggattccaggtcaaggtgctgagagaggattctagagctgcctttcggttattcgaaacaaaaattactcaagttctacatttcaccaaggacgttaaggccgcagcaaaccaaatgagaaacttcctggtccgggctagctgcagattacgtttggagccagggaaggaatatctaatcatgggacttgatggcgccacatatgatctcgagggccatccgcaatatctcctcgatagtaactcctggattgaagagatgcctagcgagagattgtgccggtccacacgccagagagctgcctgcgcccaactgaatgacttcctgcaggaatacggtacccagggctgccaggtttag

SEQ ID NO: 15068 - RNA, 726 nt, synthetic construct
  misc_feature 1..726: note = source = /note="Description of Artificial Sequence: Synthetic coding sequence"
  source 1..726: mol_type = other RNA
atgaaattcattcttctttgggctcttttgaatttaacagtcgctctggcctttaacccggattatacagtttcctccacccctccttaccttgtctatcttaaaagcgattatctgccctgcgccggcgtcctcatacaccccttatgggtaatcaccgctgcccactgcaacctcccaaagctaagagtgattttaggcgtgactatccctgccgactctaacgagaaacatttacaagtaatcggctatgagaagatgattcaccacccgcacttctccgtcaccagtattgaccacgatataatgctgattaaactgaagacagaagccgagcttaacgactatgtaaaattagcgaatctgccctaccagacaatcagtgaaaacaccatgtgcagtgtatcaacttggtcatataatgtgtgcgatatatacaaagaacctgattccctgcagaccgtaaatattagcgtgatctcaaagccacagtgcagagatgcttataaaacctacaacatcacagaaaatatgctttgcgtcgggattgtgcctggccgaaggcagccttgcaaggaggtctccgccgctcccgcgatctgcaacgggatgttacaagggattctctctttcgctgatgggtgcgttctgcgggcggacgtcggaatttacgctaaaattttctattatataccctggattgagaatgtgattcagaataactag

SEQ ID NO: 15069 - RNA, 732 nt, synthetic construct
  misc_feature 1..732: note = source = /note="Description of Artificial Sequence: Synthetic coding sequence"
  source 1..732: mol_type = other RNA
atgggacccgaagctctttcttctctcctactcctattgcttgttgcctccggcgatgctgatatgaagggccactttgaccctgccaagtgtcgctacgctttgggcatgcaggacaggactattccggattctgacatttcagcatcctcctcctggagcgactctactgccgcgagacacagccggctggaaagttccgacggagatggtgcatggtgccctgcaggatctgtctttccaaaagaagaggagtacctccaagtcgatctgcaacgacttcacttagtggcgctggtagggacgcagggaaggcatgccggaggactgggcaaagaattcagtcgttcttatcgcctgcggtatagtcgtgatggacggcgatggatgggttggaaggacagatggggccaagaggtgatttcaggcaatgaagatccagagggcgtcgtcttaaaagatctgggacctcctatggtggcgcggttggtccgcttttacccccgagccgacagggtgatgtctgtctgtttgagggtggagttatacggatgtctctggagagattgttctatgggagtctgggctagttggcagatggtgtggtggggatggatgactttaggtagagtgcggagctgcggctcagggcaagccatgacaatgtgggacggggcgacaacagcttcacccgtggcaatgtggaggtggagcctctccctgactggatag

SEQ ID NO: 15070 - RNA, 1986 nt, synthetic construct
  misc_feature 1..1986: note = source = /note="Description of Artificial Sequence: Synthetic coding sequence"
  source 1..1986: mol_type = other RNA
atggaccttgttcttaagcgttgtctgctgcatttggccgttattggcgccctgttggcagtgggagcgaccaaggttccgagaaaccaggactggcttggagtaagtcgtcaactaagaaccaaagcctggaaccggcagctttatcctgaatggacagaggctcaacgactcgactgctggcgaggaggtcaagtgtcgctgaaggtttccaatgacgggccaacgttgattggggcaaacgctagctttagtatcgcactcaatttcccaggatctcaaaaagtccttccagacggccaggttatttgggttaacaatacaataatcaatgggagtcaagtttggggcgggcaaccggtctatccacaggaaaccgatgacgcatgcattttccccgacggcggaccctgtccttcaggatcctggtcacagaaacgaagctttgtctacgtgtggaaaacatggggccaatattggcaagtactcgggggtcctgtgagtgggctgtccatcggcaccggcagagccatgttagggacacacacgatggaagtaactgtgtaccaccggagagggtccaggtcatatgtaccactcgcacattcctcctccgctttcacaattacagaccaagtgccattctctgtgagcgtgtcacagcttcgagccctggatggaggcaataagcacttccttcgcaatcagccattgacattcgctttacagctgcatgacccatcgggatacctcgcggaggctgacctgagctacacatgggacttcggcgatagctctggaaccctgatttcgcgtgctttggtagtcactcacacctatctcgaacctggtccagtaaccgctcaagttgtactgcaggcggcgatcccactcacttcatgcggcagcagtcccgtaccaggcacaactgatggacatagaccaacggctgaagcaccaaacactacagctggtcaggtcccaaccaccgaagtcgtgggcactaccccgggacaggctcccacagccgagccctctggaactacttcagtacaggtaccaacaacagaagtcatttcaactgcccctgtccagatgccaacagcagaatcaaccggcatgaccccagaaaaggtgccagtttctgaagttatgggcacgacgctcgccgagatgagcactcctgaggccacaggtatgacccccgccgaggtatccattgttgttctttccggaacaaccgccgcccaagtgaccacgaccgaatgggtggagactacagcccgcgagcttcccatccccgaaccggagggtcccgatgcttccagtatcatgtcgaccgagagcattacaggctcccttggccccttgctcgatggtactgccacccttagattagtgaaacgccaagttcccctcgactgtgtactttacagatatggctctttcagcgtcaccttggatatcgttcagggtatcgagtctgcagaaatcctgcaagctgtgccaagcggagagggagacgcattcgagttaactgtgagctgtcaaggaggcctgcctaaggaagcctgtatggagatttctagccctggatgccaaccccccgctcagcgcctgtgtcaacccgtgctgcccagcccagcctgccagctggtcttgcaccagattctgaagggcggttcaggcacatattgtctcaatgtgtctctagcggacactaattctcttgctgtggtctctacccaattgataatgccaggccaggaggctggacttggccaagttcctctgatcgttggcatcttgctcgtgcttatggccgtggttctcgcttccctgatttatcgtcggcgtttaatgaagcaggatttctctgttccacaactgccacacagttcttcccactggctgagactcccccgtatattttgctcatgtccgattggtgaaaattctccactgctctctgggcaacaggtatag

SEQ ID NO: 15071 - RNA, 2760 nt, synthetic construct
  misc_feature 1..2760: note = source = /note="Description of Artificial Sequence: Synthetic coding sequence"
  source 1..2760: mol_type = other RNA
atgggacccgaagctcttagttctctgctactcctgttgttggtagcatctggcgacgctgatatgaaaggacacttcgatcccgcaaagtgcaggtacgctctgggaatgcaggatcggacgattcccgacagcgatatctctgcaagcagtagttggtcagattccacagccgccagacactctagactggaaagctctgacggcgatggagcctggtgcccagcaggaagcgtctttccgaaagaagaggaatacctccaggtggatttgcagcgccttcatctcgttgctctggtggggacgcaagggagacatgctggaggattggggaaagagttcagtcggagctatcggctgcgatacagtagggacggccgacgctggatgggatggaaggatcgctggggccaggaagtgattagcggcaacgaggatccggaaggggttgtactgaaagacttaggccctccaatggttgcaaggctggtgcggttctatcccagggctgatcgcgttatgtccgtgtgcctgagagtagaactctatggatgtctgtggcgggatgggcttttgagctatacagctcctgtcggacagactatgtatttatccgaagcggtttacctgaatgacagcacatatgacggacataccgttgggggccttcagtacggaggactgggacagttggcagatggcgtggtgggtctggacgacttcaggaagtcgcaggaattacgagtctggcctggctacgattatgtgggatggtcaaaccacagcttttcatccgggtatgtggaaatggaattcgaatttgatcgcctgcgtgcatttcaagcgatgcaggtacactgcaataacatgcataccttgggcgcccgactgcctggtggggtcgaatgccgatttaggaggggacctgcgatggcctgggagggtgagccaatgaggcataacttaggcggcaatttaggcgatccaagagctagggcagtttctgttcctctcggaggtagagtggctcgctttctgcagtgcaggtttctcttcgctggaccatggctgctattttccgaaataagtttcattagcgatgttgttaataactcttcaccagctctcggtggcacctttcctcccgcaccgtggtggccaccaggacctccgcctacaaacttttccagccttgaactggagccgagaggtcagcagcccgtcgctaaggctgagggtagcccaaccgcgatcctgattggttgtttggtcgccataattctattgctgctgctcataatcgctttaatgttgtggagacttcactggcgccgcctgctgtccaaagccgaacgtcgcgtgctggaagaggaactcaccgtgcatctctccgtccctggagatacaattctgataaataaccggcctggcccaagagagccccctccatatcaggagcccagacctaggggaaatccacctcattccgcaccatgtgttcccaatgggtctgcacttcttttgagcaatccagcttatagattgctcctcgcgacttacgcacgcccgccacgaggacctggcccaccgacaccagcgtgggctaaaccgactaatacgcaggcttatagtggcgactacatggaaccagaaaagcctggcgcccctctgttacctccacctcctcagaactctgtcccgcattatgccgaagccgatattgttaccctgcaaggtgtcaccggaggaaatacgtatgcagtccctgcccttccccccggagctgtgggcgacgggcctccccgagttgactttccaagatcgagactgcggtttaaggaaaagctaggcgaagggcaatttggagaagtgcatctttgcgaggtagatagcccccaagaccttgttagccttgactttcccctcaatgttcgcaagggccaccccctgctcgtcgctgttaaaatactccgtcccgatgcaaccaagaacgccagcttcagccttttttctcgaaatgacttcctcaaggaagtgaagataatgtcccgcttgaaggacccgaacatcatcagactgcttggagtgtgcgtgcaggatgatccactgtgtatgatcaccgattacatggaaaacggagatctaaaccagtttcttagcgcccaccaacttgaagacaaggctgctgaaggagcaccgggtgacggacaagctgcccagggcccaacaataagttaccctatgctgctgcatgttgctgcccaaatagcttccggtatgaggtacctcgcaacacttaactttgtccacagggatctcgctactcgtaactgcctcgtgggagaaaactttaccattaagatagccgactttggcatgtccagaaatctctatgctggtgattattaccgtgtccaaggaagagccgtgctgccgattagatggatggcctgggaatgcattctcatgggaaaatttaccaccgcttccgacgtttgggcattcggagttacactatgggaggttcttatgttgtgtcgagcacagcctttcggacaactgacagatgaacaagtaattgaaaacgccggcgaattcttcagggatcagggcagacaggtctatctatccagaccccccgcttgccctcaagggctttatgagctaatgctgcgctgctggagtagggaatccgaacagcgacccccattctcacagctccaccgatttttagcagaagatgcacttaacaccgtgtag

SEQ ID NO: 15072 - RNA, 216 nt, synthetic construct; identical to SEQ ID NO: 13433
  misc_feature 1..216: note = source = /note="Description of Artificial Sequence: Synthetic coding sequence"
  source 1..216: mol_type = other RNA

SEQ ID NO: 15073 - RNA, 2685 nt, synthetic construct
  misc_feature 1..2685: note = source = /note="Description of Artificial Sequence: Synthetic coding sequence"
  source 1..2685: mol_type = other RNA
atgtccctaccacggtgctgcccacacccccttagacccgaaggttcaggtgctatgggccccgaagccctgtcttccctactattgctgctccttgtggcatctggcgatgcggacatgaagggccactttgatcccgcaaagtgccgctacgcgctcggaatgcaggacaggactataccagattccgacatatcagcttcttcctcttggtcagatagtactgccgctcggcatagccggcttgaatccagcgacggcgacggggcgtggtgccccgctggttctgtgtttccaaaggaggaggagtatttacaggtggaccttcaacgcctgcacttggttgctcttgtagggacccagggaagacacgccggggggctcgggaaggaattcagtaggtcttataggctccgatacagtcgtgatggtagacggtggatgggctggaaagacagatggggtcaggaggtcataagtggcaatgaagatccagagggtgtagtcctgaaagacctaggccctccgatggtggctcgtttggtgagattctatccccgtgccgatagagtgatgtccgtgtgccttcgagtcgaactctatgggtgcctctggagggacggactccttagctatacggctcccgtaggacagacaatgtacctgtcagaggctgtctacctgaacgatagtacctatgacggacacactgtcggcggcctgcagtatgggggtctcgggcaattagcagacggggtggtcggattggacgattttaggaagtctcaagaacttagagtttggcccggttacgattatgtggggtggtctaatcatagcttcagctctggatatgttgaaatggaattcgaatttgaccggttgagggcttttcaggccatgcaagtccactgcaacaatatgcacactcttggagctaggctgcctggaggtgtggagtgtcgtttccgccgcggtcctgccatggcttgggaaggagaacccatgagacataacctgggcggaaacctgggtgacccaagggccagagctgtcagcgtgccgctgggaggtagggttgctaggtttttacaatgtcgattccttttcgccggcccctggcttctgttctcagaaatttcctttatcagcgacgtggttaataatagcagtcccgccctaggcggtaccttccccccggccccatggtggccccccgggccaccccccacaaatttttcaagccttgagctggagccaagaggtcaacaacccgttgccaaggctgaagggtcaccaactgctattctgattggctgtcttgttgctattatcctgctgcttttactcataattgctcttatgctgtggcgattacactggcgcagactcctgtcaaaagccgagagaagagtgctcgaggaggaacttacagtgcacctgtctgtcccaggagacaccatcttgatcaataaccgccctggaccaagagaaccacctccctatcaagaaccccgacctagaggaaacccaccccatagcgccccctgcgtccctaatggcagcgcgtactcaggggattacatggaacccgagaagccaggcgctcctttactaccccccccgcctcaaaattccgtgcctcactacgctgaagctgacatcgtgacattgcagggcgtgaccggaggtaacacttacgccgtgcctgctctgccccccggagcagtaggtgacggtccccctagagtggactttccaaggagccgcctgagatttaaagaaaaactgggtgagggacagtttggcgaagtccacctttgtgaagtcgattctccacaggaccttgttagcctcgatttccccctaaacgtgcgaaaaggccaccccctgttggtcgccgtgaaaattcttaggcccgatgcgaccaagaacgcaaggaatgatttcctgaaagaagttaagatcatgagccggttaaaggaccccaatatcatcaggctacttggagtttgcgtgcaggatgatcccctttgtatgatcaccgactacatggaaaatggcgacctcaaccagtttctgtcagcacatcagctcgaagacaaagccgccgaaggcgcccccggcgacggacaagcggcccagggccctacaatctcatatccgatgctgttgcatgttgcggcgcaaattgcttctggcatgagatacctggcgactctcaatttcgtacacagagacctggctacaagaaactgcctcgttggcgaaaattttacaattaagatagcagacttcgggatgtctagaaacttgtatgccggcgactattacagagtacaaggccgtgccgttctgccaattagatggatggcctgggaatgcatactgatgggtaagtttacaacagcgagcgacgtgtgggccttcggtgtgactctttgggaagtccttatgctgtgccgcgcccagccctttggtcagctgacagacgaacaagttatcgaaaacgcaggcgaattctttagagaccagggccgtcaggtttaccttagcagaccaccagcctgtcctcaaggactgtacgagttgatgttgcgatgttggtcaagggagtctgagcagcgcccacccttttcacagctgcatcgattcttagccgaggatgctttgaacaccgtttag

SEQ ID NO: 15074 - RNA, 273 nt, synthetic construct; identical to SEQ ID NO: 13435
  misc_feature 1..273: note = source = /note="Description of Artificial Sequence: Synthetic coding sequence"
  source 1..273: mol_type = other RNA

SEQ ID NO: 15075 - RNA, 618 nt, synthetic construct
  misc_feature 1..618: note = source = /note="Description of Artificial Sequence: Synthetic coding sequence"
  source 1..618: mol_type = other RNA
atgatgcggaccctcattaccacacatccattacccttactcctgctcccacagcaactgctgcaactagtccagttccaggaggtagatacagacttcgacttcccagaggaagataaaaaggaggaatttgaagaatgtctagaaaagttcttttcgaccggccctgccagaccccctacaaaggagaaagtgaagcgaagggtattgatcgagccgggtatgcccctcaaccacattgaatattgcaaccacgagattatgggcaagaatgtgtactacaagcatagatgggttgccgaacattactttctccttatgcagtacgacgagctgcagaaaatttgttacaacagattcgtgccctgcaaaaatggtatccggaagtgcaaccgatctaagggacttgtggaaggcgtttactgtaacttgacagaggcgttcgaaatacccgcttgcaaatatgaaagcttgtatagaaagggttatgtattgattacatgttcttggcagaacgaaatgcagaagagaataccgcatactattaatgacctggttgagccccccgaacaccgctcgttcttgagtgaagatggcgtttttgtaatttcaccttag

SEQ ID NO: 15076 - RNA, 30 nt, synthetic construct; identical to SEQ ID NO: 13437
  misc_feature 1..30: note = source = /note="Description of Artificial Sequence: Synthetic coding sequence"
  source 1..30: mol_type = other RNA

SEQ ID NO: 15077 - RNA, 600 nt, synthetic construct
  misc_feature 1..600: note = source = /note="Description of Artificial Sequence: Synthetic coding sequence"
  source 1..600: mol_type = other RNA
atgtctttcagtgcaacgatcctgttttccccaccatctggatctgaagcaaggtgctgttgctgcgcgtgtaaaagcgagacaaacggtggtaataccggatctcagggagggaacccaccccccagcacgcctatcacagtcaccggccacggactggccgtgcaatcaagcgaacaactactacacgtcatataccaaagggttgataaggccgtcgggctggcagaagccgctcttggacttgccagggctaataacgaactgcttaaaagattacaggaggaagtgggcgacctccggcagggaaaagtgtctattccggacgaggacggcgaatccagggcacattctagccctcccgaagagcccggaccccttaaagagtcacccggagaggcttttaaggccctgagcgcagtggaagaggaatgtgatagcgttggcagcggggtacaggtcgttattgaggaactgagacagctaggggctgcttctgtgggaccgggaccccttgggtttccagccactcaaagagatatgcgactccctggctgcacattagccgcctccgaggcagcaccattgctgaacccatag

SEQ ID NO: 15078 - RNA, 633 nt, synthetic construct
  misc_feature 1..633: note = source = /note="Description of Artificial Sequence: Synthetic coding sequence"
  source 1..633: mol_type = other RNA
atgtcggccggaaaaatgatgcgcaccctaattaccacccatccactccctttactgctgctcccacagcaactattacaattggtgcagtttcaagaagtagatacagactttgacttcccagaggaggacaaaaaggaagaatttgaggaatgcttggagaaattttttagcaccggcccagcgagaccacccaccaaagaaaaggttaagcggcgtgttcttatcgagcctggcatgcccctcaaccacatagaatactgcaaccacgagatcatgggaaagaacgtatactacaaacaccggtgggtggccgaacactattttctcctgatgcaatacgatgagcttcaaaagatctgttacaatcgcttcgtgccctgcaagaacggaatcagaaagtgcaatcgctcaaaaggcttggtggagggggtgtactgtaatttgactgaggctttcgaaatccccgcctgtaaatacgaaagcttatatcgtaagggttacgttctaatcacatgttcctggcagaatgagatgcaaaagagaataccgcatacaatcaatgatctcgtagagcctccagaacatcgatcctttctctccgaggacggcgtgtttgtgatttccccctag

SEQ ID NO: 15079 - RNA, 1221 nt, synthetic construct
  misc_feature 1..1221: note = source = /note="Description of Artificial Sequence: Synthetic coding sequence"
  source 1..1221: mol_type = other RNA
atgcagctgttcctgctcctgtgtctagtcctgttaagcccacagggcgccagtcttcatagacatcacccgcgagaaatgaagaagagagtggaagatctgcacgtgggagccaccgtagcgccgtcatccagaagagacttcactttcgatttgtatcgggcacttgcgtccgccgctccaagccagtccatttttttttcacctgtcagtatctctatgtctctagctatgttatcactgggcgctgggtcctcaactaaaatgcaaatcctggaaggcctgggactgaatctccagaagtcctcagagaaagaacttcacagaggctttcagcagctactgcaggaacttaaccagcctagggacgggttccaactcagtttagggaacgctctgtttacagacctggtggtagaccttcaggatacattcgtcagcgctatgaaaacattgtacttggccgatacttttccaacaaatttccgcgattctgccggggctatgaaacagattaatgattacgtcgccaagcaaaccaagggaaaaatagtcgaccttctgaaaaaccttgatagcaatgccgttgtgatcatggtgaattacatcttcttcaaggcaaagtgggagactagtttcaaccataagggaacgcaagagcaggacttttacgtaacttcagagacagttgtgagagtgcctatgatgagcagggaggaccagtaccactaccttttggaccgtaatctatcttgtagggtcgttggggtgccgtaccagggcaacgccacagccttgtttattctccccagtgaagggaagatgcaacaggtcgagaacggactgtccgaaaaaaccttaaggaaatggctcaaaatgttcaagaaacgacaactcgaactgtatttacctaaatttagtattgagggcagttaccagctggagaaagtccttccatcccttggtatttctaacgtattcacctcccacgctgacttaagcggtatttcaaaccattctaacatacaggtaagcgagatggtacataaggcagttgttgaagtagatgagtcaggcactagagccgccgctgctaccggcacaatatttacatttagaagcgcaagattaaacagtcagaggctggtgttcaataggcctttcctgatgtttattgtcgataacaatattctgttcctgggcaaagtgaatagaccctag

SEQ ID NO: 15080 - RNA, 600 nt, synthetic construct
  misc_feature 1..600: note = source = /note="Description of Artificial Sequence: Synthetic coding sequence"
  source 1..600: mol_type = other RNA
atggagacctttcctctcctactgttatccctcggcttagttctggctgaagcttccgagtccacgatgaaaatcataaaagaggaattcacagacgaagaaatgcagtatgacatggctaaatctggacaggaaaaacagacaatcgaaatactgatgaatcctatcctgctggtgaagaatacttccttgtcgatgtccaaggatgatatgtcctccacccttctgacctttcgcagccttcactacaatgaccctaaaggtaatagttctggaaacgataaagagtgttgtaacgatatgacagtgtggcggaaggtgtcagaggctaacggtagctgcaaatggtccaataatttcattcgttcgtcaaccgaggtcatgcggcgcgtccacagagccccttcctgcaaatttgtccagaatcccgggatttcttgttgcgaatccctcgaattggaaaataccgtgtgtcaatttaccaccggcaagcagttcccaaggtgccagtatcattcagtcacaagcctcgaaaagatcttaacggtcctgacgggccattctcttatgtcttggctcgtgtgtgggtccaaattgtag

SEQ ID NO: 15081 - RNA, 411 nt, synthetic construct
  misc_feature 1..411: note = source = /note="Description of Artificial Sequence: Synthetic coding sequence"
  source 1..411: mol_type = other RNA
atgagtttcagcgccactattctgttctctcctccatcgggctccgaggctagatgttgttgttgtgcctgcaaatccgaaaccaatggaggaaacactggtagtcaggggggtaatcctccaccgtccacacccatcaccgtaaccggccatgggctggccgtgcaatcgtccgagcaattactacacgtgatttatcagcgcgtggacaaagccgtagggctggccgaggctgcattgggactagctagagcaaacaacgaactcttgaagaggctccaggaagaggtaggggaccttcggcaaggtaaagtgagtattccagacgaggatggagagtcccgcgcccattcgtctcctcccgaagagccaggaccattaaaagaaagcccaggagaggccttcaagtag

SEQ ID NO: 15082 - RNA, 252 nt, synthetic construct; identical to SEQ ID NO: 13443
  misc_feature 1..252: note = source = /note="Description of Artificial Sequence: Synthetic coding sequence"
  source 1..252: mol_type = other RNA

SEQ ID NO: 15083 - RNA, 30 nt, synthetic construct; identical to SEQ ID NO: 13444
  misc_feature 1..30: note = source = /note="Description of Artificial Sequence: Synthetic coding sequence"
  source 1..30: mol_type = other RNA

SEQ ID NO: 15084 - RNA, 519 nt, synthetic construct
  misc_feature 1..519: note = source = /note="Description of Artificial Sequence: Synthetic coding sequence"
  source 1..519: mol_type = other RNA
atgcagctctttctactcctctgcctcgtgttacttagtcctcagggagcatcactgcatagacaccacccaagggagatgaaaaaaagggtagaggacctccacgttggggctacagtggcaccttcaagtaggcgagatttcacttttgacctctaccgcgctctggcttcggccgctccatcccaaagcatatttttcagtcctgtctctattagcatgtcgcttgctatgctgagtcttggcgcaggctcctcaaccaaaatgcagatactcgagggcctaggcttgaacttgcagaagtcatcggaaaaagaactgcatcgaggatttcagcagctgctgcaggaactaaatcagccgcgggacggatttcagcttagtctaggcaatgccttgtttaccgacctcgttgtcgacttgcaagacacattcgtgagtgcaatgaaaacactttatctcgctgacactttccccaccaattttcgagattccgctggcgccatgaaacaaatctag

SEQ ID NO: 15085 - RNA, 615 nt, synthetic construct
  misc_feature 1..615: note = source = /note="Description of Artificial Sequence: Synthetic coding sequence"
  source 1..615: mol_type = other RNA
atgcctgggggcaaaaaagttgccggcggcgggagcagcggggccactccaacaagcgcagccgcgacagcccccagcggcgtgagaaggctggagacatctgaaggaacaagtgcacagagggatgaagaacccgaggaagagggagaagaggatctgagagatggcggtgtgcctttctttgtgaataggggagggctgccggtcgatgaggcaacgtgggagcgcatgtggaaacacgttgcaaagatacaccccgacggtgaaaaagtagcacagagaattcgtggcgccactgatctaccaaaaattcccattccttccgtgcctacgttccagccgtcaacaccggtaccagaaagacttgaggccgtccagcggtacattcgtgaactgcagtacaatcacactggcacccaattcttcgagattaaaaagagcagacccctcacgggactgatggacctggcaaaggagatgaccaaggaagccctgccaattaagtgcctggaagctgtcatcctgggaatgtatcccagctctccagagggcgaaggatccggattattatgggcttctgctagctgcagtgaaagtgagggaggagtgggatag

SEQ ID NO: 15086 - RNA, 1221 nt, synthetic construct
  misc_feature 1..1221: note = source = /note="Description of Artificial Sequence: Synthetic coding sequence"
  source 1..1221: mol_type = other RNA
atgcagctgttcttactgctatgtctcgtgctgctctctccacaaggtgcctctttgcacaggcatcacccaagggaaatgaaaaaacgagtcgaagacttgcatgtcggtgcaactgtggccccaagctctcgtcgcgattttacattcgacctgtaccgcgctctcgcgtcagctgctccctcccagagtatattcttcagtcccgtgtcaatatctatgtcgctggcaatgctcagcctgggcgccggatccagtacaaaaatgcagatcctcgaaggcctcggccttaatctccagaaaagtagcgaaaaagaactacacaggggatttcaacaactgctgcaggaactgaaccagccacgggatggatttcagctctcattaggaaatgcattattcaccgaccttgttgtggacctgcaggacacatttgtcagcgccatgaaaactttgtacctggcggataccttccccaccaacttcagggacagtgccggagcaatgaaacagattaatgactatgtcgccaaacaaactaagggtaaaattgtagatctactgaagaatctagattccaatgctgttgttattatggttaattatatttttttcaaggccaaatgggagacctcctttaaccacaaggggactcaggagcaggatttctatgtcactagcgagaccgtcgtcagagtacccatgatgagcagagaagaccaataccactatctgctggaccgtaacctgtcatgtcgagtggtgggcgtgccctaccaaggcaatgcaacagccctctttattttaccttccgaaggaaaaatgcaacaagtggaaaatgggctgtccgagaagaccctcaggaaatggcttaagatgtttaaaaaacggcaactggagctgtacctccctaagttctcaattgagggtagttatcaactagaaaaggttctccccagcttaggtattagcaatgttttcacatcacatgcagatctgtcaggaatttccaatcattcgaacatccaggtgtcagagatggtgcacaaagccgtagtcgaggtggacgagagtgggacacgggccgcagccgctacgggaacaatctttaccttcagatcagctcggttaaacagtcagcgattagtgttcaatcgacctttcttaatgttcattgtggataacaatatcttattcttaggaaaagttaaccggccctag

SEQ ID NO: 15087 - RNA, 3837 nt, synthetic construct
  misc_feature 1..3837: note = source = /note="Description of Artificial Sequence: Synthetic coding sequence"
  source 1..3837: mol_type = other RNA
atgagactgttactgttggttccactattactggccccagcccccggttcaagtgcccccaaggtgcgcagacagagcgacacctggggaccatggtcccagtggagtccctgctctagaacgtgtggcggtggagtctcatttcgagagaggccttgttattcccagcgccgggacggtggaagttcctgcgttggtccggctagaagccatagaagctgtaggaccgaaagttgcccagatggcgcacgggattttcgcgccgagcagtgcgccgagtttgacggagcggaatttcagggacgacgctacaggtggctaccgtactattcagcaccaaacaagtgtgaattaaactgtataccaaagggagaaaacttttactacaaacatcgcgaagctgtggtggacggcacaccttgcgagccaggtaaacgagacgtctgtgtagacggaagttgcagagttgttggatgtgaccacgagcttgatagttcaaagcaggaggataaatgcttacggtgcggcggggatgggacaacctgctaccccgtagccgggacttttgacgctaatgatctgtcccggggctataatcagatcctgatagtccccatgggcgccaccagcatacttattgacgaagctgccgcctctaggaactttctggccgttaagaatgtaaggggcgagtactacctgaacgggcattggactatcgaagcagcacgcgcactacctgccgcctccacgattctacactacgagcgtggcgcagaaggagatctggcgcccgaacgtctccatgcgcgcgggccaacttcagagccattagtaatcgaactcatttcgcaggaacccaacccaggagtgcactacgagtaccacctcccgcttcgccgaccatcgccagggttctcatggtcgcacggaagctggagtgattgttccgcagagtgcggtggcgggcaccagtcaagattggttttttgtacaattgatcacgaagcatacccagaccacatgtgccaacggcagccgagaccagctgacagaagatcttgtaatctgcatccttgcccagaaaccaaacggtggaaggccggaccgtgggccccttgttcagcctcttgtggcggtggctcccagtctcggtctgtctactgtatctcttccgatggcgccggaattcaggaggctgttgaagaggccgaatgtgccggactcccaggcaagcctccggcgatccaagcatgcaatttgcagaggtgcgctgcatggagcccagaaccttggggcgaatgttcagtgtcctgcggcgttggagtcaggaagcgatctgtgacttgcagaggcgaacgagggagcctcttacacacggccgcttgctccttggaagaccgccctccgttgaccgaaccatgcgtgcacgaagactgtccactattaagcgaccaggcctggcatgtgggaacatggggcttatgttccaaatcttgctctagtgggacaagacggagacaggtaatatgtgccataggaccccccagtcactgcgggtctttacaacattctaaacccgtcgatgtggagccgtgtaatacccaaccgtgccacttgcctcaggaggtcccatctatgcaggacgttcacacaccagccagtaatccctggatgcctctaggaccacaggagtctccggcttctgactcaaggggccagtggtgggcagcacaagaacatcctagcgccagaggagatcacagaggggaaaggggagatccacgaggggatcagggcacacatctgtcagcccttgggccagccccgtctctgcagcaaccaccttaccaacaacccttgcggtcagggtccggcccacacgattgcagacatagtccccatggctgttgtccagacggccacactgcctctttaggacctcagtggcagggctgtcccggcgcaccttgtcagcagagcaggtacggctgttgtcctgatcgcgttagcgttgccgaagggccccaccacgctggctgcaccaagtcatatggcggagattcaaccggagggatgccccggagcagggctgtggcctccacagtgcataacacacaccaaccacaagcacaacagaacgaaccatccgagtgccgaggctcacaattcggctgttgctatgacaacgttgcaaccgcagctgggcccctgggagaaggatgcgtgggacaaccttctcatgcctaccccgtcaggtgcctgctaccgagcgcccacggttcctgcgcagactgggccgctcgttggtacttcgtcgcctccgttggccagtgtaataggttctggtatggcggctgtcacggaaatgcaaacaactttgccagcgaacaggagtgcatgtcatcctgccagggctccctgcacggacctcggcgccctcagcctggcgcaagtgggaggagtacacacacagacggaggggggagctcaccagcaggcgaacaggaaccatcacaacaccgcaccggagccgcggttcagaggaagccttggccatccggggggctatggagacaggaccagcagcctggccctggagaggccccacatacacaggccttcggcgaatggccttggggtcaggagctgggatcccgtgcacctggactagggggtgatgcaggatcccccgcgcctcccttccattcgtcatcttaccgcatctcgctggcgggcgttgaaccttcccttgtccaagccgctctaggtcaattagttcgcctcagctgtagtgatgataccgcccccgagtcccaggcagcatggcaaaaagatgggcaaccaattagcagtgataggcacagactccagtttgacggttctctaatcattcaccccctgcaagctgaagacgcgggcacatactcttgcggatcgaccaggcccggccgtgacagtcagaagattcagttgcgtattatcggaggcgatatggcggtcctgtctgaagccgagctgtccaggttcccgcaacccagagaccccgcccaggatttcggtcaggccggggcagccgggcccctcggagcaatccccagctcgcacccacagccagccaaccgcttgcgactggatcagaaccagccacgagtcgttgatgcctctcccggacaacgcatcaggatgacttgccgagcggaaggatttccaccccccgcgattgaatggcagagagatggtcagccagtcagctcacctcgtcaccagcttcagccagatggcagcctcgtcattagccgggtggctgtggaggatggggggttttatacttgcgtagcttttaacgggcaggacagagaccagcgatgggtgcagctgagagttctgggagagttaaccatcagcgggctaccaccaactgtaaccgtacctgagggtgacaccgcgagactgctgtgtgtcgtagctggagagtccgttaatattcgatggtcacgaaatgggctgcccgttcaggctgatggtcacagggtgcaccagagccccgacggaacacttctgatttataacctgagagcaagagatgaggggtcctacacatgtagtgcctaccaaggatctcaggcagtatccagatccactgaagtgaaggtcgtctccccagcaccaaccgcccagccaagagacccaggacgcgattgcgtagaccagccggagctcgctaattgtgacctcatcttgcaagcccaactgtgtgggaatgaatactattcttccttttgttgcgcctcatgctctaggtttcaaccgcacgctcagccaatatggcagtag

SEQ ID NO: 15088 - RNA, 261 nt, synthetic construct; identical to SEQ ID NO: 13449
  misc_feature 1..261: note = source = /note="Description of Artificial Sequence: Synthetic coding sequence"
  source 1..261: mol_type = other RNA

SEQ ID NO: 15089 - RNA, 906 nt, synthetic construct
  misc_feature 1..906: note = source = /note="Description of Artificial Sequence: Synthetic coding sequence"
  source 1..906: mol_type = other RNA
atgcagttgttcctactcctttgcctggtcctgctctcccctcagggagctagcctccacagacatcacccccgtgagatgaaaaaacgggttgaggatctccatgttggtgctacagtcgccccaagttcacgcagagacttcactttcgacttgtaccgtgccctcgcaagtgctgccccttcccagagcatttttttcagccctgtgtctatttctatgtccctggccatgctgtctctcggagctggctcctccactaaaatgcaaatactggaaggccttggtctgaacctccaaaaatctagtgaaaaagaactgcatcgcggattccagcagctgcttcaggaactgaatcaaccgagggacggatttcagttgagtctcggcaatgctctttttactgatctggttgtggatctacaggatacctttgtctccgcaatgaagacactatatttagcagatacgttccctaccaattttagggatagcgctggcgcaatgaaacagatcaacgattacgtcgctaaacaaacaaaaggtaaaatagtggacttgcttaaaaatttagatagcaatgcggttgttattatggttaattacatctttttcaaagctaaatgggagacttcatttaaccataaaggtactcaggaacaggatttctatgtgacgagtgaaaccgttgtgagagttcccatgatgtccagggaagatcagtaccactacttgttagatcggaacctatcctgccgtgttgttggagtgccctaccaaggcaatgccaccgctctttttatcctgccatctgagggcaagatgcagcaagttgaaaatggactcagtgagaaaaccctccggaaatggctcaaaatgtttaagaagcgttactttcagacatag

SEQ ID NO: 15090 - RNA, 411 nt, synthetic construct
  misc_feature 1..411: note = source = /note="Description of Artificial Sequence: Synthetic coding sequence"
  source 1..411: mol_type = other RNA
atggagaccttccccctcctgttactcagtcttggactcgtgcttgccgaagcctctgaatccacaatgaagatcataaaggaggaattcacagacgaggagatgcaatacgatatggccaaaagtggacaggaaaagcaaactatagagatactgatgaatcccatactactcgtgaaaaacacctccctctctatgagcaaagacgatatgagttccaccctcctgacattcagatctctgcattataatgatccaaagggcaattccagcggtaatgataaggaatgttgtaatgacatgaccgtgtggcgcaaagtaagtgaagccaatggaagctgtaaatggtccaataatttcatccggtctagtacagaggttatgcgcagagttcatagggcccccagttag

SEQ ID NO: 15091 - RNA, 1221 nt, synthetic construct
  misc_feature 1..1221: note = source = /note="Description of Artificial Sequence: Synthetic coding sequence"
  source 1..1221: mol_type = other RNA
atgcagcttttcctgttgctgtgtcttgtacttctaagcccccagggggccagtctccaccgtcatcatcctagggaaatgaagaaacgagtagaggaccttcacgttggcgctactgtggcaccatcaagcagacgggacttcaccttcgacctgtacagagccctcgcttccgcggcccctagccagtctatctttttctcccccgtgtcaatttccatgtctctcgccatgctgtctttaggagccggatcctctacgaaaatgcagatcctagagggactcggcttgaatctgcaaaagtctagcgaaaaagaactccataggggcttccagcaattacttcaggaactaaatcaacctcgcgatggcttccagctgtccctgggtaacgccctttttaccgatctggttgtagatctacaggatacattcgtatctgccatgaaaacgttatacctggctgacacatttccaactaattttagagacagcgcaggagcaatgaagcagatcaatgattatgttgccaaacagaccaaagggaaaattgttgatctactgaagaatctcgactctaacgcagtggtaattatggtaaattacatctttttcaaggccaagtgggagacaagctttaaccataaaggaacacaggaacaggacttctatgtaacatccgagactgtggtgagggttccaatgatgagcagggaggatcagtaccattatctcctggaccgaaacttaagctgccgtgtggtgggagtgccataccaagggaacgcaaccgccttgtttattctgccatcagaaggaaaaatgcagcaagtggagaacggactgtccgaaaagacccttagaaaatggcttaaaatgttcaagaagcgccaactagaactttatctccccaaattctctatcgaaggttcctatcagcttgagaaagtgctgccttccctgggaatctccaacgtgttcacatcacacgccgacctgtctggcatatctaatcactcgaacatccaggtatcagagatggtgcacaaagcagtcgtggaggtcgacgagagtgggacccgagccgcagcagcgaccgggacaatttttaccttcagaagcgcccgtttaaacagtcagagactggttttcaacagacccttcttaatgttcatagtagacaacaatatattgttcttgggaaaagtaaatagaccttag

SEQ ID NO: 15092 - RNA, 618 nt, synthetic construct
  misc_feature 1..618: note = source = /note="Description of Artificial Sequence: Synthetic coding sequence"
  source 1..618: mol_type = other RNA
atgatgcgtacacttataaccacacaccctctgcctctactcctgttgccccaacaactgctccaactggtacagtttcaggaagttgacaccgatttcgattttcccgaggaagacaaaaaagaagagtttgaggaatgtttggagaagttcttttcgaccggccctgccaggccccccacaaaggagaaagtgaaacggagagtgctgatcgaacctggcatgccattgaaccacattgaatactgcaatcacgagattatgggtaagaacgtttactacaaacaccggtgggtagcagaacattatttcctactgatgcagtatgacgaactgcagaagatttgctacaatcgattcgtgccgtgtaagaatggtatcaggaagtgtaatagatccaaaggactagtagagggcgtgtactgcaatctcacagaagcctttgaaatccctgcatgcaagtatgaaagtctgtaccgaaaagggtacgtgttaattacatgttcgtggcagaacgaaatgcagaagaggatcccccataccataaatgacctagttgaacctccggagcatcgtagtttcctgagcgaagacggcgttttcgttatatctccctag

SEQ ID NO: 15093 - RNA, 240 nt, synthetic construct; identical to SEQ ID NO: 13454
  misc_feature 1..240: note = source = /note="Description of Artificial Sequence: Synthetic coding sequence"
  source 1..240: mol_type = other RNA

SEQ ID NO: 15094 - RNA, 618 nt, synthetic construct
  misc_feature 1..618: note = source = /note="Description of Artificial Sequence: Synthetic coding sequence"
  source 1..618: mol_type = other RNA
atgatgcgaaccctgataaccacacacccgttgcccttgctgttgcttccacaacagctcctacagcttgtgcagttccaagaagtggatacggattttgattttccagaggaagataagaaggaagaattcgaggagtgtttggaaaaattcttctccaccggaccagccagaccacccactaaagaaaaagtcaaacgacgagtgctaatcgaacctggaatgccactgaatcatatcgagtactgcaaccacgagattatgggaaagaacgtgtattataagcatcgctgggtggccgaacactacttcttactgatgcaatacgacgagctgcagaagatttgttataatcgctttgtcccctgcaaaaatggaatacggaaatgcaacagatccaaaggattggttgagggggtttattgcaatctcacagaggccttcgagatcccagcatgtaaatacgaatcactgtatcggaagggctacgtactaattacctgcagttggcagaacgagatgcagaaaaggatacctcatactataaatgacctggtggaaccacctgaacacaggagttttctttccgaagacggcgtgttcgtcatctcaccctag

SEQ ID NO: 15095 - RNA, 3789 nt, synthetic construct
  misc_feature 1..3789: note = source = /note="Description of Artificial Sequence: Synthetic coding sequence"
  source 1..3789: mol_type = other RNA
atgcgccttcttttgctggtaccactgctcttggcacctgctcctggttcatcggcgcccaaagtgcgaaggcagagcgacacatggggaccatggagtcaatggtcaccgtgctctcgaacatgtgggggtggagttagcttccgcgagagaccttgctacagccagagacgggatgggggcagcagctgtgttggaccagccagaagtcaccgaagttgtcgtaccgaatcttgtcctgacggcgctcgtgatttccgggccgaacagtgcgctgaattcgacggcgccgaattccagggcagaaggtaccggtggttaccatactactctgcccctaataaatgcgaactgaactgcatccccaaaggcgaaaacttttactataagcacagagaggctgtggttgacggcaccccatgcgaacccggaaagcgtgatgtctgtgtcgacggctcatgtcgagtggtaggctgtgatcacgaattagattcctctaagcaagaagacaagtgtcttcgctgcggcggcgacggtactacttgttatcctgttgctggaacttttgatgcaaatgacttatctcgaggttataatcagatcctcatcgtgcctatgggtgcaacatctattttaatcgacgaagctgccgcttcccgcaacttcctggcagtgaagaatgtaaggggggaatattacctgaacggacattggacgatagaagccgctcgagcccttcccgcagccagcactattctccactacgagcggggcgcagaaggtgacttggccccagaacgcctgcatgcgcggggccctacctccgaaccactagttatcgagttgatctcccaggaaccaaatcccggcgtgcactacgagtatcatctgccccttcgaaggccatctcccggcttctcttggtcccatggcagttggtccgattgttcagccgagtgcggcggagggcatcaatcgaggctggttttctgcaccatagaccacgaggcttacccagaccatatgtgccaacggcaacctagaccagcagataggcgttcgtgcaatcttcatccttgtcccgagactaagagatggaaggcaggtccatgggccccctgctctgcctcttgtggcggtggctcccagtcacgaagcgtttactgtatctcttccgatggggccggcatccaggaagcagttgaggaggctgaatgcgctggtttgcccggaaaaccaccggcgattcaggcttgcaatttacaaagatgcgcggcctggagccctgaaccttggggggagtgtagtgtatcctgtggcgtaggtgtgagaaagcgatcagtgacttgtagaggagagcgtggttctcttttacacaccgctgcttgttcccttgaagaccggcccccactgaccgagccttgcgtccatgaagactgtccgctgctgagtgatcaggcttggcacgttggcacatgggggttatgttcaaagagttgctcaagtggcaccagaagaagacaggtgatttgcgccatcggacctccctctcactgtgggagcctgcagcatagcaaacccgtagatgtggagccctgcaacactcagccatgtcatttaccccaagaggtgccatccatgcaggatgtccacacgccagcctcaaacccctggatgccattaggaccccaagagtcacctgctagcgatagtcgtggacagtggtgggcagcacaggaacacccaagcgctcgtggtgaccatcgtggcgagaggggcgacccccggggtgaccaaggaacgcatctcagcgctctcggccccgcacctagcctgcaacagcccccataccagcaacccttaagatcaggctctggtccccacgactgccggcacagcccacacggatgctgccctgatggtcacactgcctctctggggccgcagtggcagggttgtcccggagccccttgccaacagagtcggtatggatgctgccccgatagagtatccgtagcagaaggcccccaccacgccgggtgtacaaaaagttatggaggtgatagcaccggcggaatgcctcggagccgtgcagtggcaagcaccgtgcacaacacccaccagcctcaggcacagcagaacgagccatccgagtgtagaggatcacagttcgggtgttgctatgacaacgttgctacagcggcaggcccactgggcgaaggatgtgtcggacaaccgagtcacgattgggctgcaagatggtactttgtggccagcgtggggcagtgtaatagattttggtacggaggatgccacggtaacgctaataattttgctagtgaacaggaatgtatgtctagctgtcaggggtctttacacggcccaagacggcctcagcccggagcaagtggccggtctacacacacggacggaggcggatcctcacccgctggagaacaagaaccctcgcaacaccgcacaggagctgccgttcaaaggaagccatggccatcgggcgggctgtggcgccaggaccaacagccaggacccggggaggcaccacacacccaggcttttggggaatggccatggggacaggagctcgggtctcgggctccagggcttggtggcgacgccggctcccctgcccctcctttccactcttcatcctatagaattagcctggccggtgtagagccctccctcgtccaggctgctctaggacagctcgttcggttaagctgttccgatgatactgcccccgagagccaggcagcctggcaaaaggacgggcagcccatttcctctgacagacacagactgcagttcgacgggtccctgatcattcatccccttcaggcagaggacgccggtacttattcttgtgggagcaccagacctggaagggactcacagaaaattcaactgcgcattattggaggtgatatggccgtgctctccgaggcagaactaagtagatttcctcaaccccgtgacccggctcaggacttcggacaggcgggtgctgctggccccctgggggccattccctcatcacaccctcagcccgccaatcgcctgcgtctcgaccagaatcaaccccgagttgttgatgcttcaccaggacagagaatacggatgacatgtagagctgaaggctttcctcctcctgcaatcgagtggcagcgtgacgggcagcccgtatctagcccacggcatcaactgcagcccgatgggtcgctggttatcagtagagttgcagtcgaggacgggggattctacacttgcgttgctttcaacggccaagatcgtgatcaacgctgggttcagctgcgtgtgttaggcgagctgaccattagtggactgccccctaccgttacagtccccgaaggtgacactgccagattgctttgcgtggtagcaggcgagagtgtcaatattagatggtccagaaatgggctgccagtccaggctgacggccacagggtccaccagagccctgacgggacattgctcatttacaatctccgagcacgggatgaaggctcttatacctgcagcgcataccaaggctctcaagctgtttcccgaagtaccgaggttaaagtagtaagtccagcccccaccgcccaaccccgtgaccccggtcgcgactgtgtggatcagcccgaacttgcgaactgtgacctgatcttgcaggcacaactgtgcggaaatgaatattattcgagcttttgctgcgcctcctgtagccggtttcaacctcacgctcaacccatctggcaatag

SEQ ID NO: 15096 - RNA, 321 nt, synthetic construct
  misc_feature 1..321: note = source = /note="Description of Artificial Sequence: Synthetic coding sequence"
  source 1..321: mol_type = other RNA
atgtcattctctgccaccatactgttttccccaccatccggttccgaagctaggtgttgctgttgtgcctgtaagtctgagaccaacgggggcaatactggctctcaaggcggcaatccccccccaagcacacccatcaccgttacggggcatggtctcgctgtccagagttcggagcaactgttgcatgttatctaccagagagttgataaagccgtgggactcgccgaagctgctctaggcctagctagagcaaacaacgagctgctgaagaggctccaggaagaggtcggcgacctccggcaagggaaggttagttag

SEQ ID NO: 15097 - RNA, 444 nt, synthetic construct
  misc_feature 1..444: note = source = /note="Description of Artificial Sequence: Synthetic coding sequence"
  source 1..444: mol_type = other RNA
atggcactccaaagaacccactcactgttgctgctgctgctgttgactctgctcggcttaggtctggtgcaaccgagctacggccaggatggcatgtaccaacgttttcttcgccagcacgttcaccctgaagaaaccggaggttctgacagatactgtaacctaatgatgcagcgtaggaaaatgaccctctaccattgcaagcgttttaacacattcatacacgaagacatttggaacattcgctccatctgctctacaacaaatatccagtgtaagaacggaaaaatgaattgtcatgaaggagtagtcaaggttacagattgcagggatactggctcttcaagagcgccgaactgtagatatcgcgccatcgcatcaacacgcagggttgtgattgcttgtgaaggaaatccccaagtccccgtgcattttgatggttag

SEQ ID NO: 15098 - RNA, 435 nt, synthetic construct
  misc_feature 1..435: note = source = /note="Description of Artificial Sequence: Synthetic coding sequence"
  source 1..435: mol_type = other RNA
atgcagttattcctccttctctgtctcgtactcctttcccctcaaggagctagcctgcatcgccatcacccacgagaaatgaagaaacgagtggaagatctgcatgtgggagccacagttgcccccagctctagacgggactttaccttcgacttgtatcgcgccctcgcctccgccgccccatcccagtccatattcttttccccagtgagcatatccatgagcctggccatgttgagccttggggcaggaagctcaacaaagatgcagattctcgaaggtttgggcctaaatctgcagaagtcctccgaaaaggaactgcacagaggctttcaacagctgctgcaagaactgaaccaaccccgcgacggcttccaactcagccttggcaacgctctgtttaccgacttagttgtcgatcttcaggatacctag

SEQ ID NO: 15099 - RNA, 540 nt, synthetic construct
  misc_feature 1..540: note = source = /note="Description of Artificial Sequence: Synthetic coding sequence"
  source 1..540: mol_type = other RNA
atggggtcgtccgggctgttgtccttactggtactctttgttctgttggctaatgtccagggccccgggctgaccgactggcttttcccccgccgttgtcctaagattcgtgaagagtgtgaatttcaagaacgcgacgtgtgtactaaggatcgtcagtgccaagacaataagaagtgttgcgttttctcctgtggaaagaaatgtttggacctgaagcaagacgtttgcgagatgcccaaggaaacaggaccctgtctagcctatttcctacactggtggtacgacaagaaagataacacctgctccatgtttgtgtatggcgggtgtcaaggaaacaacaataactttcagtcaaaagccaattgcctaaacacatgtaaaaataaacaaccatgccccaagatcaaggtggagtgtgaagtggaggaaatcgatcaatgcaccaaacctagagactgccccgagaatatgaaatgttgccctttcagcagagggaagaaatgtctggattttcgaaaagcgtcactgtctacctag

SEQ ID NO: 15100 - RNA, 444 nt, synthetic construct
  misc_feature 1..444: note = source = /note="Description of Artificial Sequence: Synthetic coding sequence"
  source 1..444: mol_type = other RNA
atggctctacagagaacacactctctgttgctcctgctacttttgacccttctcggactgggactggtgcaacctagctacggacaggacggtatgtaccaacgctttctaaggcagcacgtgcacccagaagaaaccgggggcagcgataggtactgtaatctgatgatgcagcgtagaaagatgaccctatatcattgtaagcgctttaacacattcatccatgaggacatctggaacatacgttcgatctgctctacaacgaatatacaatgcaaaaatggtaagatgaactgtcatgaaggggttgttaaggtaacagactgccgagacaccggcagctcaagagcacctaactgccggtatagagccattgcatctacacgtcgagttgtgatcgcctgcgagggcaacccacaagttcctgtgcactttgatggatag

SEQ ID NO: 15101 - RNA, 600 nt, synthetic construct
  misc_feature 1..600: note = source = /note="Description of Artificial Sequence: Synthetic coding sequence"
  source 1..600: mol_type = other RNA
atggaaaccttcccacttctactccttagcctcggactggtgctcgccgaggcctcagaatctacaatgaaaatcatcaaagaagaatttaccgacgaagagatgcagtacgatatggccaaaagtggtcaggagaagcagaccattgaaattctgatgaaccctatcctactcgtcaaaaacacctccttgtccatgagcaaagatgatatgagttctactctgctgacatttaggagtctccattacaatgacccaaaagggaattcttccggcaacgacaaggaatgctgcaacgatatgacggtatggcggaaggtcagtgaagctaatggttcttgcaaatggtctaacaattttatacgctctagcacagaggtaatgcgacgagtccatcgggcacccagctgcaaatttgtgcagaatcctggcatcagctgttgtgaaagcctcgagctcgaaaataccgtatgccagtttactactggaaagcagtttcccagatgtcagtatcactccgtcacatctttagaaaaaattcttacagtcctgacaggccacagtttaatgtcctggttagtgtgcggatccaagctctag

SEQ ID NO: 15102 - RNA, 153 nt, synthetic construct; identical to SEQ ID NO: 13463
  misc_feature 1..153: note = source = /note="Description of Artificial Sequence: Synthetic coding sequence"
  source 1..153: mol_type = other RNA

SEQ ID NO: 15103 - RNA, 75 nt, synthetic construct; identical to SEQ ID NO: 13464
  misc_feature 1..75: note = source = /note="Description of Artificial Sequence: Synthetic coding sequence"
  source 1..75: mol_type = other RNA

SEQ ID NO: 15104 - RNA, 633 nt, synthetic construct
  misc_feature 1..633: note = source = /note="Description of Artificial Sequence: Synthetic coding sequence"
  source 1..633: mol_type = other RNA
atgtccgcaggaaagatgatgagaaccctgatcacaacccacccactaccactgctactactaccccagcagctgctgcagttagtgcaatttcaagaggttgataccgatttcgatttcccagaggaagacaaaaaagaggagtttgaggagtgtctagaaaagttcttcagtactggccccgccagaccgccaaccaaggaaaaggtgaagagaagagtgctgatcgagccgggaatgccgttgaatcacatcgaatactgtaatcacgaaattatgggcaagaatgtttattacaaacaccgatgggtggccgaacattacttcctgctgatgcaatacgacgaactacagaagatctgctacaacagattcgtaccatgtaagaacggtatccgcaagtgcaacaggagcaaaggcctggtggaaggagtttattgtaacctgaccgaagctttcgaaatcccagcatgcaagtacgaatccttatatagaaagggctacgtgctgattacttgttcttggcaaaatgaaatgcagaaaagaattcctcacaccataaacgatctggttgagcctcccgagcatagaagtttcctttcagaagacggcgtgttcgtgatttccccatag

SEQ ID NO: 15105 - RNA, 36 nt, synthetic construct; identical to SEQ ID NO: 13466
  misc_feature 1..36: note = source = /note="Description of Artificial Sequence: Synthetic coding sequence"
  source 1..36: mol_type = other RNA

SEQ ID NO: 15106 - RNA, 444 nt, synthetic construct
  misc_feature 1..444: note = source = /note="Description of Artificial Sequence: Synthetic coding sequence"
  source 1..444: mol_type = other RNA
atgatcatcatggtgatcatttttctggtgcttttattttgggagaatgaagttaatgatgaagctgtgatgagtactcttgagcatcttcatgtcgattatccacagaatgacgtgcccgtccctgcccggtattgcaaccacatgataatccagagagtgattcgcgagccagatcacacttgtaagaaggaacacgtatttattcacgagaggcccagaaaaattaacggtatttgtatatctccaaagaaagtcgcttgccagaatctctccgccatcttttgttttcagtccgaaaccaaatttaagatgaccgtctgtcagttgatcgaaggaactcgctaccctgcgtgcagataccattattccccaaccgaaggctttgtcctcgtgacatgtgacgacctgcgcccagactcctttttgggttacgtgaagtag

SEQ ID NO: 15107 - RNA, 696 nt, synthetic construct
  misc_feature 1..696: note = source = /note="Description of Artificial Sequence: Synthetic coding sequence"
  source 1..696: mol_type = other RNA
atgcagctgtttctgctcctttgcctggtccttctgtcaccccaaggggcctcgctgcacagacaccatcctcgggagatgaaaaagagagtggaagacttgcatgttggcgccacagtagccccgtcaagcagaagagacttcacatttgacttgtatagagccctcgcttcggccgcacctagtcagagcatatttttctcccccgtatctatctcaatgtccttagcaatgctcagtctcggagccggctcctcaaccaagatgcagatcctggagggccttggcctgaatcttcaaaagtccagtgagaaagagttacaccgggggtttcagcagttgctacaagagcttaatcagccacgtgacggtttccaactctctctggggaatgccctctttactgacctcgttgtggacctccaagataccttcgtgagcgcgatgaagacattatatctggccgatacattccccaccaacttcagagattccgccggcgccatgaaacagatcaacgattacgtagcaaagcagaccaagggcaagatcgtcgacttgcttaaaaatctcgattcgaacgctgtggtgattatggtgaactatattttttttaaggccaaatgggagacaagcttcaatcataaaggaacgcaggaacaggacttctatgttacttctgaaacagtcgtctag

SEQ ID NO: 15108 - RNA, 1626 nt, synthetic construct
  misc_feature 1..1626: note = source = /note="Description of Artificial Sequence: Synthetic coding sequence"
  source 1..1626: mol_type = other RNA
atggcaaagtttggggtgcacagaatactgctactggcaataagcctgactaagtgcctagaaagcacgaagcttctggcggatcttaaaaagtgcggggaccttgagtgtgaagccctgataaatcgggtgtcagcaatgagagactacagaggacctgactgtcgctatcttaattttacaaaaggcgaggaaatctcagtttatgtgaagttggctggcgaaagagaggacctatgggcgggcaaggggaaggaattcgggtattttccaagggatgcagtgcagattgaagaggttttcattagcgaggagattcagatgagcactaaggagagcgactttctgtgcctacttggcgtatcttacacgtttgacaatgaagacagtgaactcaacggtgattacggcgagaatatttatccctatgaagaagataaggacgagaaaagcagcatttacgagagcgactttcagatcgaacccggattctacgccacttatgagagcacactgttcgaagaccaggtgccagcccttgaagcccctgaggacatcggcagtacaagtgaaagcaaagactgggaggaggttgtggtcgagtccatggaacaagataggattcctgaggtccatgtgccccccagctcagcagtgagtggcgttaaggagtggtttggattaggtggggagcaagcagaggagaaggcttttgaatcagttattgagcccgtgcaggaatcatcatttcgatctagaaaaatcgctgtcgaggacgaaaacgatctggaggaactgaataatggggaacctcaaactgagcaccaacaagaaagcgagagtgagattgattccgtacctaagacccaaagtgagctcgcatctgagtccgaacatatcccgaaacctcagtctaccggctggtttggaggcgggttcacaagctatttggggtttggcgacgaggacaccggtctggaattaatcgctgaagagtccaaccccccactgcaagacttccctaactctatatctagtgacaaagaagccaccgtgccatgtactgagatattaactgaaaagaaggataccataaccaacgatagcctttccctgaagccatcctggtttgacttcgggttcgcaatactcggttttgcatatgctaaggaagacaaaatcatgctggacgatcgaaagaacgaagaagatgggggcgccgatgaacacgaacacccactcacctccgaattagaccccgagaaagaacaagagatcgagacgattaagataattgaaaccgaagaccagatcgacaaaaaaccagtatctgaaaaaacggacgagagcgatacaattccatatctcaagaagtttttgtataactttgacaatccatggaacttccagaatattcccaaggaaactgagttaccgtttccaaagcagattctcgatcagaataatgtaatagagaacgaagagacaggcgagttcagcatagataactacccaaccgacaacaccaaggtcatgatcttcaaaagcagttactcattgtctggctggtatgagaacatctacatccgcatctacttcatcttcaagcacaacctctttctgtag

SEQ ID NO: 15109 - RNA, 1245 nt, synthetic construct
  misc_feature 1..1245: note = source = /note="Description of Artificial Sequence: Synthetic coding sequence"
  source 1..1245: mol_type = other RNA
atgaatcccaccctaggtctggccatattcctggctgttttgctaactgttaaaggactgctgaagcccagcttttctcctaggaattataaagccttgtcagaagttcaaggatggaagcaaagaatggccgcaaaggagttagctcgtcagaatatggatttaggattcaaattgctgaaaaagctcgccttttataaccccggcaggaatatatttctatcccccttgtccatatccactgccttttccatgctctgtcttggagcccaggattctaccctcgatgaaatcaagcagggatttaactttcgtaaaatgccagaaaaagaccttcatgaagggttccactacatcatccacgagctgacacagaagacccaggacctcaagctgagcattggaaacacactattcattgaccagagactccagcctcaacggaaattcctggaagacgcgaaaaacttctactctgccgagaccatcttaacgaattttcagaatcttgaaatggcccagaagcagataaatgattttatatcccaaaaaacacatggcaaaatcaacaacctcatcgaaaatatcgatcccggcaccgtcatgctgctggcaaactacatatttttccgtgccaggtggaagcacgaattcgaccctaacgttactaaagaagaagatttcttcctggaaaaaaacagctccgtgaaggtccctatgatgtttagaagcggtatataccaggttggttatgacgacaagctatcctgtacaatcctcgagatcccctatcagaaaaatatcacagctattttcatcctaccagatgagggaaaactgaaacacctggagaagggcctgcaagtcgatacatttagccgatggaagaccctgctctcgagacgcgttgtagacgtttcagtaccgagattacacatgactggcacattcgatctgaagaaaaccctctcatatataggcgtatctaagatttttgaagaacacggtgatctgacaaagattgccccccataggtctctgaaggtcggtgaggcagttcacaaggcggagttgaaaatggatgaacgaggcactgagggtgctgccggaaccggagcccagacccttccaatggagacccccctggtcgtaaagattgataaaccatacctgttactgatttacagcgagaaaattccttctgtccttttcctcggtaagattgttaatcccattggtaagtag

SEQ ID NO: 15110 - RNA, 618 nt, synthetic construct
  misc_feature 1..618: note = source = /note="Description of Artificial Sequence: Synthetic coding sequence"
  source 1..618: mol_type = other RNA
atgatgaggacattaataactactcatccgctgccattactccttcttcctcagcagttgctccagctcgtacagttccaggaagtggatactgatttcgattttccagaagaagataagaaagaggaattcgaagaatgcttagagaaatttttttcaaccggtcctgcacgcccgcccaccaaagaaaaagtgaagcgcagggtgttgattgaacccggaatgccactgaaccacatagaatactgtaatcatgagattatggggaaaaatgtttactacaaacaccggtgggtcgcggaacattattttcttctcatgcagtacgatgaactccagaagatttgttataatcgttttgttccttgcaaaaatggtatccgtaagtgtaaccgcagtaaaggcttggtagaaggagtgtattgcaacctcaccgaagctttcgagatacccgcttgtaaatatgaaagtctctatagaaaaggttacgtcctgatcacctgttcatggcagaatgaaatgcaaaagcgtattcctcataccattaacgatctggttgaaccccctgagcatcggtccttcctctcagaagacggagtatttgtcattagtccatag

SEQ ID NO: 15111 - RNA, 516 nt, synthetic construct
  misc_feature 1..516: note = source = /note="Description of Artificial Sequence: Synthetic coding sequence"
  source 1..516: mol_type = other RNA
atggaaacattccccctcctactacttagtcttggcctggtgctcgcagaggcttccgagtcaaccatgaagataatcaaagaagaattcaccgatgaagagatgcagtacgacatggcaaaaagtggacaggagaagcagaccatcgagatcttaatgaatcccatcttactggttaagaacacctctttgagcatgagtaaggacgacatgtcttctacactgcttacctttagaagcctccactataacgatcctaaaggcaactcttccggaaacgataaagaatgttgcaacgatatgacagtctggagaaaagtgagcgaagccaatggcagctgcaagtggtcaaataacttcattcggagctcgacggaagtgatgagaagagtccaccgagcccctagttgtaagttcgtccagaatcccggcatatcctgttgcgagtcacttgagttagagaacacggtatgtcagttcacaacaggtaagcagtttcctcgatgccaatattag

SEQ ID NO: 15112 - RNA, 633 nt, synthetic construct
  misc_feature 1..633: note = source = /note="Description of Artificial Sequence: Synthetic coding sequence"
  source 1..633: mol_type = other RNA
atgtcagctggaaagatgatgcgtactctgatcactacccaccccctacctttactgctgctaccacagcagctcttgcaactggtccagtttcaagaggttgacaccgactttgattttcccgaggaagataaaaaagaggagttcgaggaatgtttggagaaattttttagcaccggtccagctagaccacctaccaaagagaaagttaaacgaagagtgttgattgagccgggaatgcccctgaaccatatagaatattgcaatcacgaaatcatgggaaaaaatgtctattacaaacatagatgggtggcagagcattatttcctgctgatgcaatacgatgaactgcagaagatttgttataaccggtttgtgccctgcaaaaacggaatccgcaagtgcaaccggagcaaggggttggtagaaggggtgtattgtaacctgactgaggcctttgaaatccccgcttgtaagtatgaaagcctgtatcgaaagggttacgtcctcatcacgtgtagttggcagaacgagatgcagaaaagaatcccacacacaattaatgacctggtagagcctcctgagcacagaagttttctttccgaagatggcgtttttgtaatcagcccctag

SEQ ID NO: 15113 - RNA, 537 nt, synthetic construct
  misc_feature 1..537: note = source = /note="Description of Artificial Sequence: Synthetic coding sequence"
  source 1..537: mol_type = other RNA
atggagacatttcctctactcctgctgtccctgggactagtgcttgccgaagcctccgagtccactatgaagattatcaaagaggagtttacagacgaagagatgcaatacgacatggcaaagtccggtcaagaaaagcaaacaatcgaaattctcatgaaccctatattactggtgaagaacacaagcctatctatgtccaaagacgacatgtcatcaactctgctgacattccgaagtcttcactataatgaccctaaaggcaactcctcagggaatgacaaagaatgttgtaacgacatgactgtgtggcgaaaagtctcagaggctaatgggtcttgcaaatggagtaataattttatacgtagttctacggaagtcatgagaagagtgcatagagcaccatcctgcaagttcgttcagaatccagggatcagttgctgcgagagcctggagctcgaaaacaccgtttgtcaatttactacagggaaacaattccctcgctgtcaatatcactccgtaaccagcttagaatag

SEQ ID NO: 15114 - RNA, 474 nt, synthetic construct
  misc_feature 1..474: note = source = /note="Description of Artificial Sequence: Synthetic coding sequence"
  source 1..474: mol_type = other RNA
atgcagctttttctgctgctgtgtctcgtattgctctcccctcagggagcctctctccaccggcaccacccacgagagatgaagaaacgggttgaggatctccatgtcggcgccacagtggctccctcctctcgccgcgactttacttttgatctctacagagctctcgcgtctgctgcgccctcccagtccatcttcttctcaccagtatctatctctatgagtcttgccatgttatcccttggagccggttcctctacaaaaatgcaaattttagagggcctgggcctgaacctgcagaaaagctccgagaaggagttacatcggggatttcagcagcttctgcaggaactcaatcaacctcgggatggcttccaactttcactgggcaacgctctttttactgatctcgttgttgatctacaagatacattcgtatccgctatgaagaccttatacctggccgatacatag

SEQ ID NO: 15115 - RNA, 1035 nt, synthetic construct
  misc_feature 1..1035: note = source = /note="Description of Artificial Sequence: Synthetic coding sequence"
  source 1..1035: mol_type = other RNA
atgccgcctagaatgctggtcgcacccctccctctacattttctgttggctgccgtgtcctctgagaatcgctccggtagaaggcaatggcaacaggccgtggccgctggcagcggccctgggagaaactcttcccgagctattcactggtcgttgcccagagccctcgtgccagctactggtacacgagcatccggatcccagaagagacagcggcccccaaaaggccaggaagcgctatggagccgtccccattctcggcactccgccgaacgcgccggaggatctcactctgaccccggacgattgtccgctccgcttggactgggcctcccttcaggccggggtcggcttaccgcaatgccaggtcgagcacctctaaggactgttcccggcgcactcggggcttggctgttgggcggcctgtgggcctggaccctttgtggactctgtagcctgggcgctgtcggtgctcccagaccctgtcaggcaccccagcaatgggagggccgtcaagtgatgtatcaacagagcagcggtcgaaattctagggccttattatcttacgacgggttgaatcagagggtgcgagttctcgatgaacgtaaagctctgatcccctgcaaacgactctttgagtacattcttctttataaggacggagtgatgttccagattgaccaggccaccaagcagtgcagtaagatgaccctgactcagccatgggaccccctagacatcccacagaattctacattcgaggatcaatactccatcggcggcccacaggaacagatcaccgtgcaagaatggagcgaccgcaaaagtgcacgcagctatgagacctggattggaatatataccgtaaaagactgctatcccgtccaagaaactttcaccatcaattactctgtcatactatccacccgtttctttgatatccagctcggaataaaggatccttccgtgttcacaccacccagcacctgccagatggctcagctcgaaaagatgtctgaagactgttcttggtag

SEQ ID NO: 15116 - RNA, 321 nt, synthetic construct
  misc_feature 1..321: note = source = /note="Description of Artificial Sequence: Synthetic coding sequence"
  source 1..321: mol_type = other RNA
ggccagcctaaagccgcacccagcgttactctgttccccccttcctcagaggaattacaagccaacaaagccacattagtttgcctggtttctgacttttatcctggcgcagtcaccgtggcatggaaggcagacggatcccccgtcaaggtgggcgtcgagacaacaaaaccctccaaacagagcaataacaaatacgcagccagctcttacctgagcttgacccccgagcaatggaaatcccaccggagctatagttgccgcgtcacacatgagggaagcaccgttgaaaagacagtggcccctgctgagtgttcatag

SEQ ID NO: 15117 - RNA, 672 nt, synthetic construct
  misc_feature 1..672: note = source = /note="Description of Artificial Sequence: Synthetic coding sequence"
  source 1..672: mol_type = other RNA
atgcgcctgcaaagacctagacaggctccagcaggaggtaggagggcgcccagagggggacgcggatcaccttaccgacctgaccccggaagaggtgctagacgcctgcggcgctttcagaagggcggtgaaggagccccaagagctgatcccccctgggcaccactgggaaccatggctttactcgcattactgttagtggttgccttgccaagagtatggaccgacgctaacctgacagcccgccagcgcgatcctgaagattcccaaagaacggacgagggcgacaatagggtgtggtgccacgtttgcgagagagaaaataccttcgaatgtcaaaatccaagaagatgcaaatggacagaaccctactgtgtcatagctgccgtcaaaatttttcctagatttttcatggttgccaaacaatgttctgctgggtgcgccgctatggaacgaccaaaaccagaggaaaagcgtttcttgcttgaggagcctatgcctttcttctacttgaagtgctgtaaaattaggtactgcaacctggaaggcccacccatcaacagttccgtttttaaagagtacgcaggctccatgggggaaagctgtggtgggctgtggttggccatacttctgttgctcgcttctattgccgctggactttcactctcttag

SEQ ID NO: 15118 - RNA, 1542 nt, synthetic construct
  misc_feature 1..1542: note = source = /note="Description of Artificial Sequence: Synthetic coding sequence"
  source 1..1542: mol_type = other RNA
atggccccagccagaacgatggcacgcgcaagactcgcccctgccggaatccccgctgtcgctctttggctgctatgtacattgggccttcaaggcacgcaagcaggtcctccccctgccccacccggcctacctgctggagccgattgcctcaattctttcacagctggcgtcccaggatttgtcttagacaccaatgcaagtgtatccaacggagctactttcctcgaaagccccacagttcggcgcggctgggactgcgtaagagcctgctgtacaacccagaattgtaatctcgcactggtggagcttcagcccgatagaggtgaggatgctatcgctgcctgttttctcattaactgtttgtatgaacagaactttgtgtgcaaatttgcccctcgcgaaggctttatcaattatctgactcgcgaagtgtatcgatcttaccgccagctgagaactcaaggatttgggggaagtggaatcccaaaagcatgggctggcattgatcttaaagtacaacctcaggagcccctggtcctcaaggacgttgagaatacagattggagactgctacgaggcgacacagacgttagagtggagcggaaggaccccaatcaggttgagctttgggggcttaaagaaggaacctatttattccaacttaccgttacatcatccgatcatcccgaagacacagctaacgtcacagtcactgtactctcaacgaagcagactgaagactattgtcttgcctccaataaggtgggcagatgcagaggcagcttcccacggtggtattatgatccaacggagcagatatgtaagtccttcgtgtatggcggatgcctcgggaataaaaataactacctgcgagaagaagaatgtatcttagcctgcaggggcgtgcagggtcccagcatggaacgcagacaccccgtatgctctggaacctgtcagccaacacagtttaggtgctccaacggatgttgcattgacagcttcttagagtgtgatgatacacccaactgccctgatgcaagcgacgaggccgcatgtgaaaaatataccagcggatttgatgaacttcaacggatccatttccctagtgacaaaggccattgcgttgaccttccggacactggattatgtaaagaatcaatcccccgatggtactataacccattctctgaacactgcgccagatttacttacgggggctgttatggcaataagaataactttgaagaggaacaacaatgtttagagtcctgcagaggtattagcaaaaaggatgtctttggcctgagacgagagattccaattccatcaactggcagtgtagagatggctgtggccgtatttctagtcatttgcatagtcgtagtcgtagcaattctgggatactgcttttttaagaaccagagaaaagatttccacggacaccatcatcacccaccgcccaccccagcatcaagtacagtttcaaccactgaagataccgagcacctagtttacaaccatacaacccggcccctatag

SEQ ID NO: 15119 - RNA, 1341 nt, synthetic construct
  misc_feature 1..1341: note = source = /note="Description of Artificial Sequence: Synthetic coding sequence"
  source 1..1341: mol_type = other RNA
atgctacatcctgagacatctccaggtcgaggacacttattggccgtgctactagcgttgctcggtacagcatgggccgaagtgtggccaccccaattgcaggagcaagcaccaatggccggagccctgaatagaaaggaaagtttcctgctactgtctctgcacaaccgcctgagatcttgggttcagccccctgccgcagatatgaggcgattagattggagcgacagtcttgctcagttggctcaggcacgtgccgccctctgcggtatcccgactccatctctcgccagcgggctgtggagaaccttacaagtgggatggaacatgcagttgcttcccgccggtctggcgtctttcgttgaggtggtgtcactctggtttgccgaggggcaacgctattcccatgcagccggcgaatgcgctcgcaacgcaacatgtacacactacacacagctcgtttgggcaacttcttcacaacttggctgtggaaggcatctctgttctgccggtcaggccgctatcgaggcatttgtttgcgcctacagcccccgaggtaattgggaggtcaatgggaagaccatcgtcccttataagaagggtgcttggtgtagcctctgcaccgcctccgtgagcgggtgctttaaagcctgggaccacgcaggcggcttatgtgaagtccctcgcaatccctgtagaatgtcatgtcagaaccatggtcggctgaacatcagcacatgccattgccattgtcctccaggttatactggcaggtactgccaggtcagatgttcactccaatgcgtacacggccgctttcgggaggaggagtgtagctgcgtttgcgatattggctacggaggagcccagtgcgctaccaaggttcatttcccctttcatacttgtgatctgcgaatcgatggggattgtttcatggtcagttccgaagcagatacgtactaccgcgctagaatgaagtgtcagagaaaggggggagttctggcccagatcaagagccaaaaagtgcaggacattctggccttctatctcggtcgactagaaacaactaatgaggtgattgactccgacttcgagacgcgcaatttttggatcggcctgacctacaagacggctaaggacagcttccgatgggctactggtgagcatcaggcatttacgagtttcgcttttggacagccggataatcatggatttggaaattgcgtcgagctccaggcctccgccgcctttaactggaacaatcagagatgcaaaacaaggaaccggtatatttgccagttcgcacaggaacatattagtcgttggggcccgggatcttag

SEQ ID NO: 15120 - RNA, 936 nt, synthetic construct
  misc_feature 1..936: note = source = /note="Description of Artificial Sequence: Synthetic coding sequence"
  source 1..936: mol_type = other RNA
atgggggttatggcaatgctcatgcttcctctactactcctggggatttcgggacttctcttcatttaccaagaagtgtcacgcttatggagtaaatctgctgtgcagaataaggtagtggtcattacagacgcgatctcaggtttgggcaaggaatgtgcgagagtgttccacacggggggtgcccggctcgtactgtgcggcaaaaactgggagcgcttagagaatctgtatgacgccctaatctccgttgcagaccccagcaagactttcacgcccaagttggttctcctcgatctctccgacatttcctgtgtccccgacgtcgccaaagaagtgctcgattgctatggatgcgtagacattcttataaataatgcctctgtgaaggtgaaaggcccagcacacaagatctccctggagctggataagaagattatggacgccaactacttcggcccaataaccctgacgaaagctctgctgcctaatatgatctcccggagaactggtcagattgtactcgtgaataacatccaaggaaagttcggcattccttttaggaccacttacgctgccagtaagcatgccgccctagggttttttgattgcctgcgagccgaagttgaagaatacgacgtggtcatttctactgtttcccctacatttatccgttcctaccatgtgtatcctgaacagggaaactgggaggcgtcaatttggaaattctttttccgaaagctcacatacggagtccatcccgtcgaggtcgccgaggaggtcatgaggaccgtgcgaaggaagaaacaggaagtgtttatggctaatccgattcctaaagctgctgtctacgttcgcacattttttcccgagtttttctttgcagtcgttgcgtgcggagttaaagaaaagctaaatgtgcccgaggaaggttag

SEQ ID NO: 15121 - RNA, 594 nt, synthetic construct
  misc_feature 1..594: note = source = /note="Description of Artificial Sequence: Synthetic coding sequence"
  source 1..594: mol_type = other RNA
atggctaagaatggactagtcatctgcatcctggttattaccttgctcctggaccagaccacatcacacacctcaagactaaaggcacgcaagcactcaaagcgacgcgtacgtgacaaggacggtgacctgaaaacacaaatagagaagctatggactgaggttaatgctctgaaggagatccaggccctccaaaccgtctgcctgaggggaacaaaagtgcacaagaagtgctacctcgcgtccgaaggcctgaagcacttccacgaagccaacgaagactgtatcagcaaaggcggcatcctggtaattcctcggaactcagatgaaatcaatgctcttcaggattacggcaaaagaagcttgccaggggtaaacgacttctggttgggaattaatgacatggtcacagagggcaagttcgtagacgttaacggcatcgctatcagctttttgaattgggacagagctcaacctaacggcggcaagcgagagaactgcgttttattcagccagtccgcacaggggaagtggtctgatgaggcatgtaggagttcaaagcggtatatatgcgaatttaccattccacagtag

SEQ ID NO: 15122 - RNA, 705 nt, synthetic construct
  misc_feature 1..705: note = source = /note="Description of Artificial Sequence: Synthetic coding sequence"
  source 1..705: mol_type = other RNA
atgaaagttcttctcttaactggtctaggagcccttttctttgcgtattactgggacgataactttgacccagggggactcgattacttagtcctaaaccatattggcggagccccagcaggcactagagccagatctccccaggccacgcgctggctaatgcaagtcaactttgtttcttacgttcagctcacatcccgcgcactgccatctctgaccgactcgaaaggctctctggtggtggtctcaagtctactaggaagagtcccgacatctttttctactccctacagcgcagcaaagttcgccttagacgggttttttggtagccttaggagagaactcgatgtgcaggacgtcaatgtcgccatcacaatgtgcgttctgggactcagagatcgggcctctgccgccgaagccgtaagatcctctacctctcgcccccgccagccggagcaccgaggtgttccactacaatctcagaccgcaatgtttctgccgccgactgttccaggtgcccggacacttaccgaaaccccactgagagggtggcctcagcccaagatgaagtcctcacgccaaaaaagcaagactgaaaaaaatgatgggcatctcgaaccagtaacagcctgggaggtacaggttcctcgagtgagaagactgtgccgaggactggctagaccacaccttttcggacacgactag

SEQ ID NO: 15123 - RNA, 228 nt, synthetic construct; identical to SEQ ID NO: 13484
  misc_feature 1..228: note = source = /note="Description of Artificial Sequence: Synthetic coding sequence"
  source 1..228: mol_type = other RNA

SEQ ID NO: 15124 - RNA, 225 nt, synthetic construct; identical to SEQ ID NO: 13485
  misc_feature 1..225: note = source = /note="Description of Artificial Sequence: Synthetic coding sequence"
  source 1..225: mol_type = other RNA

SEQ ID NO: 15125 - RNA, 861 nt, synthetic construct
  misc_feature 1..861: note = source = /note="Description of Artificial Sequence: Synthetic coding sequence"
  source 1..861: mol_type = other RNA
atgaaagtgttgctgttaactggcctcggcgctttattttttgcgtactattgggacgacaacttcgatccggcttcattacaaggcgcgcgggttctactgactggtgcgaacgccggtgtgggagaggagttagcctaccattacgcaagactcggctcccatctggttcttactgcacacacagaagctctgttgcagaaggtcgttgggaactgcagaaaactgggagccccgaaggtgttttacatcgcagcagacatggctagtcccgaagcccctgagagtgtggtacagttcgcccttgacaaattaggaggtctcgattacctggtgctgaatcacataggaggggcgcccgccggaactagagctcgatcaccacaagctacccggtggctcatgcaggtgaatttcgtgtcgtatgtgcagttgactagtagggctcttccaagcctcacagactccaaggggtccttagtagttgtatctagccttctaggaagagtgcctacgtctttctccactccatactcagcggccaagtttgccctagatgggtttttcgggtcactcaggagggaacttgacgttcaggatgtgaatgttgcaattacaatgtgcgtcttagggctgagagaccgcgcgtctgcagccgaggctgttcgtggagtcacaagagtgaaagccgcccccggacccaaagcagccttagccgtaatcagagggggtgctacacgggccgcgggagtgttttacccgtggaggttccgactgctgtgtctgctgagaagatggctccctaggccgagagcatggtttattcgccaagaactgaacgtcaccgcagccgctgcttag

SEQ ID NO: 15126 - RNA, 459 nt, synthetic construct
  misc_feature 1..459: note = source = /note="Description of Artificial Sequence: Synthetic coding sequence"
  source 1..459: mol_type = other RNA
atgcaggttaactttgtatcctacgttcaactgaccagcagagcacttccatcactgacagatagcaagggctcactggtcgtcgtgtcatcgctcctgggccgagtacccacctcattttcaacgccttattcagccgctaagttcgccctagacggattctttgggagcctgagacgggaacttgacgtgcaggatgtcaacgtcgcaataaccatgtgtgtcttgggactgcgcgaccgagccagcgccgctgaagcagtaagaggtgtcacaagggtgaaagccgctcctggcccaaaggccgcattagctgtgattagggggggagcaacgagggccgcgggcgtgttttatccctggcgatttaggctgctgtgtcttctccgtcgatggctgcctagaccaagagcctggttcatccgacaggaactaaacgtgaccgccgctgctgcttag

SEQ ID NO: 15127 - RNA, 2856 nt, synthetic construct
  misc_feature 1..2856: note = source = /note="Description of Artificial Sequence: Synthetic coding sequence"
  source 1..2856: mol_type = other RNA
atgcgagttctagcctgcctgttggccgcacttgtgggcattcaggcggtggaaagactcagattagctgacggccctcatggatgtgcaggacgactggaagtatggcatggcggacgatggggaactgtatgtgatgacgggtgggacttaagagatgccgctgtggcttgcagacagctgggctgcggaggcgcattagcagctcctgggggcgcgttctttggagagggagctggtcctgtctggctctctgagctcgcctgtcggggtaatgaagggcaactggggctgtgtcaccaccgcggctggaaggcccacatctgttctcatgaagaagacgccggtgtagtttgcgccggacagagagtggctaactctcgcgatgattcaacttctcccctggatggagcgccatggccaggcctgcttctagaactgagccccagtaccgaagaaccactagtgactcatgcccccagacctgctggaaatccccagaatgcctcccgcaaaaaatctccacggcccaagcaagccaaatccactagggccccattgctgaccactggcgccccacggcaagaacgattgaggcttgtgtcgggacctcacaggtgtgcgggccgtctcgaggtatggcacggagggagatggggcacggtctgcgatgatggatgggatttgcgagacgcagctgtggcatgtagggagctgggatgtggtggggcgttggccgcacccggcggggctaggtttggaccaggtgcaggccctgtttggatggacgatgtaggctgtgggggaggggaacaggccctgagggattgccctcgatctccgtgggggagaagcaactgcgatcacagcgaggatgcaggactggtgtgcacgggccctgcccctcgcctgagactagcagatggaccccatggttgtgccggtcgcctggaagtttggcacgggggccgctggggaagtgtttgtgacgatgcctgggatctgagggacgctgccgtggcatgtcgtgagcttggctgtgggggagcattagcagcgccgggcggtgctttcttcggtgaaggcagcgggccaataattttagacgaccttaggtgtcgaggaaacgaaaccgcactgaggttctgtcctgccagaccttggggacagcatgattgtcaccaccgggaggacgctggagctgtttgtgacggaatgccccttgggtatgtgccccctactgctcccaccgactccaataacagtacgccacgggaagccgcatcccgtccgccatctactatgactagccaggcccccggcactgcaggagtgtcccccccaccggcttctcctacagttttgtgggagcccggaccagaggcaggatcccctcagctaagactcgtggcgggcccatcaaaatgtagtggtaggttagaagtttggcacgatcagcgctggggaaccgtgtgtgatgatagctgggatatgcgtgactctgccgtggtctgtagagaactgggatgtggtgggcctcagcagcctgaccccgccgccggcaggtttgggtggggtgctggaccaatttggttagacgatgtggggtgtgttggaactgaggctagtttgtcagactgccctgctgctccgtggggaaaacacaactgtgcccataacgaggacgtgggagtgacctgtaccgggccgccagggcttgattctattagcgatccattcagctggagctggatacccggattgggacgcgaccgggacgcctggctgccgggagagctggccactaagcccagtgcatcagtaacagcatcagtccttgaaaaaaccactaccaaagcaccaggcaagatgcctaagtctacgaagaagtgggttactaaaaatgccaagcgcccgaccactcaaccacccgtgatgcccacaaccaagcacagccgcgctcaaagcccccccgacctcactagtcagaccaccgccgccctaacgacagaagctagcagacggcctacttcagagtttaccagaaggccaacaactgaggcacctcaacggtggaccagtcatactactgccacgcttactccacaggcacctagggaacggacgacaaagacgatggcaatgctcacaactcaaggccctcaagaaatgaccagcgaatcaactattaagtccattccccaagcctccttagagccctcagccgaaatcccagaaggatctccagagtctccgaaagatccagcaccgtcccccagtgtttccaccacaggcgagtcgggactgttccgcgtaaggctcgcagatggccccaacagatgtgctggcaggctggaagtgtggcacgccgggcggtggggtacggtctgcgatgacaattgggatttacgcgacgctactgttgcttgctgggaacttggatgtggaaaagtgcggcctcgcgtcggcaaaactcactacggacccgggactggacctatctggcttgacgacatggggtgtaaaggaagcgaagccagtttgagcgactgcccatctggggcgtggggtaaacataactgcgatcatgaagaggatgtcggcctgacatgtacagggtataccgactacgacgattaccctccatggacttgggaccctacatcccgagaggatctagcgaaggggaccactacggcaggagtacctggccacaccctgccttggagaaccacgagacgtcccggatcatcttccccagctatcagaaggctacccgacaccgagccagaggctggagccccacgcggagacgccccaaggtctagaacggcacgtgtcgctgccccaccatag

SEQ ID NO: 15128 - RNA, 8430 nt, synthetic construct
  misc_feature 1..8430: note = source = /note="Description of Artificial Sequence: Synthetic coding sequence"
  source 1..8430: mol_type = other RNA
atgactctggagggactctacctggcccgaggccccctagcacggctcctgctagcgtggtccgccttactttgcatggcaggaggacagggacgctgggacggggcattagaagctgcaggacccggccgcgtcagacgacgagggagccctggcatcctgcagggtccaaatgtctgtgggtcacgttttcacgcatattgctgcccaggctggcgcacttttccaggtagatctcagtgcgttgtgcccatctgtcgacgggcatgtggggaaggtttttgctctcaaccaaatctgtgcacctgtgcggacgggactcttgcaccatcttgtggcgtaagtcggggatccggctgttccgttagctgtatgaatggcggaacatgtaggggagcatcttgtttgtgtcaaaaaggctataccggcactgtatgcggacaacctatatgcgatcgaggatgtcataatggggggaggtgtattggccctaacaggtgtgcctgcgtgtatggattcatgggaccacaatgcgaacgcgattacagaacaggtccttgctttggccaggtgggtcctgaaggatgtcagcaccagctgacaggcttggtgtgcactaaagctctgtgctgtgctacggttggtagggcctggggtcttccatgcgagttatgtccggctcaacctcacccctgcagacgcggattcatcccaaacatacatactggggcctgccaagatgttgacgagtgccaagctgtccccgggttatgtcagggcggctcttgcgtgaacatggtgggatcatttcactgccggtgtcctgtcggtcatagattgtccgattcatccgccgcctgcgaagactatcgggccggtgcctgttttagtgtcctctttggaggaagatgcgccggcgatcttgccggccattacacccgaagacagtgttgttgcgaccggggtcggtgctgggccgcaggaccagtgcctgaattatgccctcctagaggatctaatgaattccaacagctttgtgcacagcgactgcccttgcttcctggtcaccccggtctctttccgggtctgctagggtttggctcaaacggaatgggacccccactgggacccgcgcgactgaatccacatggtagtgatgctcgcgggattccatccctgggccccggaaattccaatataggcacggcaacactgaatcaaactattgatatctgccgtcactttacgaatttatgcttgaatggtcgatgcctccccactccaagttcctataggtgcgagtgcaatgttggctacacccaagacgtgagaggagagtgcattgatgtcgacgagtgcactagctcaccatgccaccacggcgattgcgtaaacatccctggtacctaccactgtcgctgctacccaggttttcaggccaccccaacacgacaggcctgcgttgatgtggacgaatgcattgttagcggcggactctgtcaccttggtagatgtgtgaatacggaggggagctttcagtgtgtctgtaatgccggatttgagttaagccccgacggaaagaattgcgtagaccacaatgaatgtgctacgtccacgatgtgtgtaaatggcgtttgtctcaatgaggacggctctttttcatgcttgtgcaaacccggttttttattagccccaggcggccattactgtatggatatcgacgaatgccaaacacccgggatatgtgtcaacggacattgcacaaatacagaaggcagttttcgatgccagtgtttaggcggactagctgtgggaaccgatggccgggtttgtgtggacacccacgtacgaagcacatgctacggggctatcgagaaaggatcctgcgctcgccccttccctggcactgtaactaaatccgaatgctgctgcgcaaatccagatcatggcttcggcgaaccctgtcagctctgtcctgctaaagattctgccgagtttcaggcgctttgctcaagtggactcggaattacgacagatggaagagatataaacgagtgtgccttggacccggaggtctgcgcaaacggcgtgtgtgaaaatcttcgaggttcttaccgatgtgtctgcaatttaggctacgaagcaggcgcttcaggcaaagattgcaccgatgtggacgaatgcgccctcaacagtctgttatgtgacaatggttggtgccagaacagccccggcagttacagttgttcatgcccccccggctttcacttctggcaggacacagaaatttgcaaagacgtggacgagtgcctgagctcaccatgcgtttccggtgtgtgcaggaatctggcaggttcttatacctgtaaatgcggccccggctctcgcttagatccatccggcactttctgcctcgactcaactaaaggtacctgttggctcaagatacaggagagccgctgtgaagtaaacttgcaaggggcctccctcagaagcgaatgttgtgctacattaggtgccgcatggggctcaccttgcgagcggtgtgagattgatcctgcgtgtgccagggggttcgctcggatgactggagtgacctgcgacgatgttaatgaatgcgaaagttttccaggggtttgtcctaacggccgctgcgtgaatactgcgggttcctttaggtgcgaatgcccggagggacttatgcttgatgccagtggaagattgtgtgtggacgtccgactggagccctgtttcctgagatgggatgaagatgagtgcggggtcacattgccgggtaagtatagaatggacgtgtgctgttgtagcattggagcggtgtggggtgtggaatgcgaggcctgtcctgatcctgagtcattggaatttgcctctctatgtccacgagggctgggcttcgcctccagagattttctatcagggagaccgttctacaaagacgttaatgagtgtaaagtgtttccaggtctgtgtacacatggcacttgtcgcaataccgtgggctcttttcattgcgcctgcgcaggaggatttgccctcgacgctcaagagagaaattgtactgacattgatgaatgccgcatttccccagatctctgcggccaaggaacatgcgtaaacacccccgggtccttcgaatgcgaatgcttcccaggatatgagtccggattcatgttgatgaagaattgcatggacgtagatgagtgcgccagggatccgctactctgtagaggaggcacctgtactaacactgacggaagctataaatgtcagtgccccccaggccacgaactcacagcaaaaggaacagcttgcgaggatatcgacgagtgcagcctctctgacggcctgtgtccccatggacagtgtgttaatgtaattggtgccttccagtgcagttgtcacgctgggttccaatccacccctgacagacaaggctgtgtggatatcaacgagtgtagagtgcagaacgggggatgtgatgtgcattgtatcaatacagaaggaagttaccgttgttcttgcgggcagggctattcattaatgcctgatggacgggcttgtgcagatgtcgatgaatgcgaggagaaccctagagtgtgtgaccagggccactgcacaaacatgcccgggggccacagatgtttatgctacgatgggtttatggccaccccagatatgaggacctgtgtcgatgtcgacgaatgtgatttaaatccccacatttgcctgcatggcgactgtgagaataccaaagggtcttttgtttgtcactgccaactaggatatatggtccgcaagggagctactggctgttccgacgtcgatgagtgtgaagtgggaggacacaattgcgattcgcacgctagctgcctgaatattcccggaagtttcagctgccgatgtttgccaggatgggtcggtgacggtttcgaatgtcacgacttagacgaatgtgttagtcaggagcatcgttgttcccctcgaggtgactgcctaaacgttcctggatcttatagatgtacatgccggcagggatttgcaggggacggattcttttgcgaggatagagacgagtgcgcggaaaacgttgacttgtgtgataacggacaatgcctgaacgccccaggtggctataggtgcgagtgtgaaatgggatttgatcccacggaagatcaccgggcttgtcaggatgtagatgagtgtgcccaaggcaacctttgcgcattcggatcctgtgaaaatctgcccggaatgtttcggtgcatttgcaacggcggatacgagcttgaccgcggcggaggaaactgtactgatatcaacgagtgcgccgaccccgttaactgtataaatggtgtttgtatcaacacccccggttcctacctctgctcttgtccgcaagattttgaactcaacccatccggtgttggctgcgtggacacgagagctggcaattgcttcctcgagactcacgaccgtggagattcagggatctcttgcagcgctgaaatcggagttggtgtgactcgggcctcctgttgttgctcattaggccgggcttggggcaatccttgtgagctttgccctatggcaaacaccacagaatatcgtaccttgtgtccaggtggcgaggggttccagcctaacaggatcacagtaatccttgaggacatagacgagtgtcaggagctacccgggctatgccaggggggagattgtgtgaatacctttggaagctttcaatgcgagtgtccgccaggatatcatctgtcagagcacaccagaatctgtgaagacattgatgaatgttctactcattcaggaatttgcggcccaggaacttgctataatactcttggcaactacacctgcgtgtgcccagcagaatacttgcaggttaacggaggcaataattgtatggatatgagaaaaagcgtatgctttagacattataacggcacctgccagaatgaactggccttcaatgtcactaggaaaatgtgttgctgttcatataatatcgggcaagcgtggaatcgcccttgtgaagcttgtcccacccccatcagccccgattatcagatcctgtgcgggaaccaagctcccggattcttgaccgatattcacaccggtaagcctcttgatatcgacgaatgcggcgaaattccagccatctgcgccaacggaatatgtattaatcagatagggtctttcagatgtgaatgcccggccggctttaactataattccattctattagcctgcgaagatgtggacgagtgtgggtcgcgcgagtctccttgccagcagaatgctgattgtataaatatacccggaagctacagatgcaaatgcacacgcgggtataaactttcacccggtggggcctgcgttggcaggaacgaatgtagagaaatccctaatgtttgtagtcatggggattgcatggatacggaaggctcgtacatgtgtttatgtcatagaggattccaagcaagcgccgaccagaccttgtgtatggacatcgacgagtgtgacagacagccctgcggtaatggaacttgtaagaacatcatcggctcttataactgtctgtgtttcccaggcttcgtagttacccacaatggggactgcgtggattttgacgagtgtaccacattagtaggtcaagtatgtcgcttcggccattgtttaaataccgcaggctcctttcactgtctatgccaggacgggttcgaactcaccgctgatggtaagaactgcgtggataccaatgaatgcctctctctggccggaacatgcctgcccggtacttgtcaaaacttggaagggtccttcagatgtatttgccccccaggatttcaggttcaaagtgaccattgcattgacattgatgagtgtagcgaagaacctaatctgtgcctgttcggaacctgcacaaacagtccgggcagcttccagtgtctttgtccacccggctttgtgctcagcgataatggacacagatgcttcgacactaggcagagtttttgctttacacggttcgaggccggcaaatgctccgtacccaaggctttcaacacaactaagacaagatgctgttgttctaaaaggcctggagaaggttggggagatccatgtgagctctgccctcaagagggaagtgctgcctttcaagagctctgtccgtttggtcatggcgctgtcccggggcccgatgattcaagagaggatgttaacgagtgtgcagagaacccaggcgtttgcactaacggtgtttgcgtcaatacagatggaagcttcagatgcgaatgcccttttggatactccctggattttacaggaatcaattgcgtggacactgacgaatgctctgtgggacatccatgcgggcaggggacctgcacaaacgtgattgggggtttcgagtgcgcctgtgccgacggatttgaacccgggctaatgatgacatgcgaagatatcgacgagtgttccctgaacccattactctgcgccttccgatgtcacaatactgaaggaagctacttatgtacttgccctgctgggtacactctgagagaggatggggcaatgtgtagagatgtggacgagtgcgccgatgggcagcaggactgtcatgccagaggaatggagtgtaagaatcttattgggacctttgcctgcgtgtgcccccctggaatgcgaccccttcctggaagcggagaaggctgcacagacgacaatgagtgccatgctcagcctgacttatgcgtgaacggaagatgcgtaaacacggcggggtctttcagatgcgattgcgacgaaggcttccagccatctcctaccctgacagagtgccatgatattaggcaagggccctgcttcgccgaggtgctccaaacaatgtgccgatcactatcttcatcgtctgaggccgtgactagagcagaatgttgctgtggcgggggaagaggctggggtccccgctgtgaactttgcccactccctgggacctccgcttatagaaaattgtgcccgcatggatccgggtacacagctgagggcagagatgtggacgagtgtaggatgttagcccatctgtgcgcccatggcgaatgtattaattctctgggatcgtttcggtgtcactgccaggcagggtataccccagacgcaaccgctacaacatgtctggacatggatgaatgctcccaagtaccgaaaccctgcacctttttatgcaaaaacactaagggaagcttcctctgcagctgtccacgtggttatctcctggaagaggatggcagaacctgcaaggatctggacgaatgtacctctcgacaacacaattgtcagtttctgtgcgtcaatacggtcggtgcctttacctgcagatgcccacccggctttactcagcatcaccaggcttgtttcgacaacgacgaatgttccgcacaaccaggcccctgcggtgcccacggccactgtcacaatactccagggagctttagatgcgagtgtcatcagggatttactctggtctcatctggccatggatgtgaagacgtaaacgaatgtgatggcccgcatcgctgccagcacggatgccaaaatcagttgggtgggtacagatgtagctgtcctcaaggttttactcaacactcccagtgggcacagtgcgtggatgagaatgaatgcgccctgtcacctcccacatgtggatctgccagctgtagaaataccctaggcggtttcagatgcgtgtgcccgagcgggttcgatttcgatcaagcgttaggagggtgccaagaggtagacgagtgcgctggcagacgcggaccctgtagttattcttgcgccaacactcccggagggttcctgtgtggatgtccccaggggtactttagagccggacaaggacattgcgtcagcggtcttggattctctccagggccacaggatacgccagataaagaggagctcctctcaagtgaagcatgctatgagtgcaaaattaatggcctgtccccccgagatcgcccccgcagaagtgcccaccgtgaccatcaggtgaaccttgccacattggatagcgaagccctgttaacgttgggattgaacctatcacacctcggacgtgcggagcgcatcctggaactaagacctgcattggagggcttagaggggaggattagatatgtaatcgttcgagggaacgaacaaggatttttccgaatgcaccatctcagaggcgttagctcactgcagctggggcgacgtcggcccggtccaggcacctacagactggaggtagtatcccatatggcaggcccttggggagtacagcctgaaggtcaacctggtccttggggccaggctctgcgcctaaaagttcaacttcagctgctctag

SEQ ID NO: 15129 - RNA, 291 nt, synthetic construct; identical to SEQ ID NO: 13490
  misc_feature 1..291: note = source = /note="Description of Artificial Sequence: Synthetic coding sequence"
  source 1..291: mol_type = other RNA

SEQ ID NO: 15130 - RNA, 1890 nt, synthetic construct
  misc_feature 1..1890: note = source = /note="Description of Artificial Sequence: Synthetic coding sequence"
  source 1..1890: mol_type = other RNA
atgcaacaagacggcctcggagtagggacacgaaacggttcgggaaaaggacgctctgttcatccctcctggccctggtgtgcccctcggccgctgcgctattttggaagagatgcgcgcgctaggagagcccaaacagccgcgatggccttactggcaggaggcctctcccggggtcttgggtcccaccccgcagccgcaggccgagatgctgtggtgtttgtttggctgttgctgtctacttggtgtactgccccagcaagagcgattcaggtcacagtttctaatccgtaccacgtggttattcttttccagcctgtgaccctaccgtgtacctaccaaatgacctctacgcccacacaacccattgtcatctggaaatataaaagtttctgtcgcgatagaatcgccgatgctttcagccccgcatccgtggacaatcagttaaatgcccagttagctgctgggaatcctgggtacaacccctacgtggagtgtcaagatagcgtaagaacagtgagagttgtggcaaccaaacaagggaacgcagtgaccctcggcgactactaccaggggagacgaatcaccattactggcaatgcagatctgaccttcgatcaaaccgcgtggggtgactccggcgtttactattgctctgtcgtctccgctcaggaccttcagggaaacaacgaagcctatgcagaactgattgttctcgactggttgtttgtggtggtggtgtgcctggctgccttcctcattttcttgctgctcgggatctgttggtgtcagtgttgtcctcacacatgctgttgttacgtacgctgcccttgttgcccggataaatgctgctgccccgaagccctatacgcggcaggcaaggctgcgacatctggagtgccgtctatctatgcaccaagtacatacgcacaccttagcccagctaagactcctcctccccccgctatgataccaatgggcccagcctataacggataccccggcggctaccctggagacgtcgatcgcagttcctccgctggaggccagggtagttacgtcccccttctcagagataccgacagctctgttgcttcagtccgcagtgggtaccgcatccaagccagccagcaggatgactccatgcgtgtcttgtattacatggaaaaagagctcgcaaatttcgacccatcccgtccaggacccccatccggacgggtggagagagcaatgtcagaggtcacaagtctgcacgaagatgactggagatccagaccttctagaggccccgcactgacaccgatccgcgacgaagaatggggagggcacagtcccagaagcccacgtggatgggaccaagagccagcaagagagcaagccggaggcggatggagagcgcgcagacccagggcaagaagcgtggatgcgctggatgaccttacaccaccttctactgctgagtctggttccaggagccctacaagcaacggtggaaggagtagagcctatatgcctccgcgctctagatctcgcgacgacctgtatgatcaggatgactcccgcgactttccgcgctctagggatccccactatgatgactttcggagtcgcgagcgcccgccagctgatcctcgttcacaccatcatagaactagagaccctcgagacaacgggagtaggtctggtgatctcccatacgacggtcggctccttgaagaggccgtacggaaaaagggcagcgaagagaggcgacgaccccacaaagaagaagaagaagaagcctattaccccccagccccgcccccctattccgaaaccgactctcaggcatcgcgcgagagacgtttaaagaagaatttagcactgagcagagaatcccttgttgtctag

SEQ ID NO: 15131 - DNA, 711 bp, synthetic construct
  misc_feature 1..711: note = source = /note="Description of Artificial Sequence: Synthetic coding sequence"
  source 1..711: mol_type = other DNA
atggatttccaagtccaaattttttcatttttattaatctccgcttcagttattatttctagaggacaaattgttttaacacaatcaccagcaattatgtcagcttctccaggagaaaaagttacaatgacatgttctgcttcatcatcagttacatcaatgcattggttccaacaaaaatctgggacttccccaaagcgttggatttatgatacatcaaagttagcatcaggtgttccagcacgattctcaggatcaggatctggtacatcatattcacttacaatttctattatggaagcagaagatgcagctacatattattgccaacaatggaattataatccacctatgggaacatttggtggaggaacaaagttagaaataaaaagagcagatgctgctccaactgtaagtatatttccaccatctagtgaacaattaacatcaggtggtgcatctgttgtttgttttcttaacaatttttatccaaaagatataaatgttaaatggaaaattgatggttcagaaagacaaaatggagttttaaactcttggactgatcaagattctaaagactctacatattctatgtcttctactttaactcttacaaaggatgaatatgaacgtcataactcatatacatgtgaagcaactcataaaacatcaacctcaccaattgtaaaatcattcaatagaaatgaatgt

SEQ ID NO: 15132 - DNA, 711 bp, synthetic construct
  misc_feature 1..711: note = source = /note="Description of Artificial Sequence: Synthetic coding sequence"
  source 1..711: mol_type = other DNA
atggactttcaagttcaaatcttctccttcctgctgataagcgcatccgtgattatctctcgtggccagattgtgctgacccagagcccagcaataatgtcagcgtcacctggcgagaaagttaccatgacttgttcagccagtagtagcgtcacaagcatgcattggttccaacagaagtcagggaccagccccaaacgctggatttacgatacgtccaagctagcgtcaggtgtgcctgcccgtttttccggctcaggcagtggtaccagttattcactgactattagcataatggaggccgaagatgctgcaacctattactgtcagcagtggaattacaatcctccgatggggactttcggcggaggaaccaaactggaaatcaaacgcgccgacgcagcacccactgtgtccatctttcccccatcctccgagcagttgacctctggtggagcctctgtggtttgttttctgaacaacttttatccgaaggatattaatgtcaagtggaagattgatggatccgaaagacagaatggagtgcttaactcatggaccgaccaggatagtaaagacagtacttactcaatgtcttctaccctgaccctgacaaaagacgagtatgagcgtcacaattcgtacacttgcgaagctacacataagacatccaccagtcccatcgtcaaaagcttcaacagaaacgagtgt

SEQ ID NO: 15133 - DNA, 711 bp, synthetic construct
  misc_feature 1..711: note = source = /note="Description of Artificial Sequence: Synthetic coding sequence"
  source 1..711: mol_type = other DNA
atggattttcaagtgcaaatcttctcgttcctgctgatcagcgcatcagttatcatctcacgaggccagatcgttctgacccaatccccggccatcatgtcggcctctccgggcgagaaggtgaccatgacctgctcagcgtcatcgtccgtcacttcgatgcactggttccagcaaaagagcggcacctcgccgaaaagatggatatacgatactagcaagctggcctccggagtcccagctcgcttttcgggctctggaagcggaacctcctacagcctgactatctcaatcatggaagccgaggatgctgcaacctactactgccagcagtggaactacaacccgccgatgggaacgttcgggggtggaactaagctggaaatcaagcgggccgacgccgcaccgactgtctccatcttccctccgtccagcgaacagttgacgtctgggggtgcctcggtcgtgtgtttcctgaacaacttttaccccaaggatatcaatgtgaaatggaagattgacggaagcgaacggcagaatggagtgctcaatagctggactgaccaagattccaaggactccacctactccatgtcgtccactctcactctgactaaggacgaatacgaacgccataatagctacacttgcgaagcgacccataagacgtccacttcaccgatcgtgaagagcttcaacaggaatgagtgc

SEQ ID NO: 15134 - DNA, 711 bp, synthetic construct
  misc_feature 1..711: note = source = /note="Description of Artificial Sequence: Synthetic coding sequence"
  source 1..711: mol_type = other DNA
atggattttcaggttcaaattttctcattcttgcttatctctgcctcagttatcatcagcagaggacagatcgtcttgacccagagccccgccattatgtcagctagcccgggggagaaagtgactatgacttgttctgctagtagttccgttaccagtatgcattggtttcagcaaaaatctgggaccagtcccaaaaggtggatttacgatacctccaaactcgctagtggggtacccgctcggttcagcggctccgggagcggcacctcatactctctcactattagtattatggaggcagaagacgctgcgacatactactgccagcaatggaactacaatcctccaatggggacattcggcggtggcaccaaacttgaaattaagagagctgacgctgcgccaaccgtgtctatattccctccctcatccgaacagctgacctccgggggcgcctcagtcgtttgctttctgaataatttctacccaaaagacatcaacgttaagtggaaaatcgatggctctgagcggcagaacggagtactgaatagctggacggaccaggacagtaaagacagcacttacagcatgtcctctacactgaccttgactaaggatgaatacgaacgccacaactcttatacttgtgaggctactcataaaacttccaccagccccatcgttaagagcttcaatcggaacgagtgc

SEQ ID NO: 15135 - DNA, 711 bp, synthetic construct
  misc_feature 1..711: note = source = /note="Description of Artificial Sequence: Synthetic coding sequence"
  source 1..711: mol_type = other DNA
atggacttccaggtgcagatcttttccttcctccttatcagcgcgtcggtgatcatctcgaggggccagatcgtgctcacgcagagcccggcgattatgtcagcctcgcccggcgaaaaggtcactatgacctgtagtgcatcctcctcggtcaccagcatgcactggttccagcaaaagagcggaaccagcccaaagcgctggatttacgacacctccaagctcgccagcggcgtgccagctcggttctctggatccgggtcgggaacttcatacagcctgaccatctcaatcatggaggccgaagatgcagctacctactactgccagcaatggaattacaacccgccgatgggaactttcggaggaggtaccaaattggagatcaagcgcgcggacgccgccccaactgtgtcgatctttccgccgtcgagcgagcaactgacttcggggggtgcctccgttgtgtgcttcctgaataacttttatcctaaagatattaatgtgaagtggaagatcgacggctcggagcggcaaaacggagtcctgaactcgtggaccgaccaggattctaaggactcaacttactccatgtcatccactctgaccctgaccaaagatgagtacgaaagacacaactcctacacgtgcgaagcaactcataaaactagcacctcccctatcgtcaagtcattcaacagaaatgaatgc

SEQ ID NO: 15136 - DNA, 711 bp, synthetic construct
  misc_feature 1..711: note = source = /note="Description of Artificial Sequence: Synthetic coding sequence"
  source 1..711: mol_type = other DNA
atggactttcaggtgcagatcttctccttcctgctgatttctgcaagtgtgattatcagccgaggtcagattgtactgacacagtctcccgccatcatgagtgccagcccaggcgagaaggttaccatgacatgttcagcgtcgagcagcgtgacctcaatgcactggttccagcagaaatctggtacatcgcccaagcgctggatctacgacacatcaaagctcgccagtggagtgcccgcgcgatttagcggatcaggctcaggtactagttacagtctgacgataagcattatggaggcggaggatgctgcaacctactactgccaacagtggaactacaatccacccatgggaacattcggcgggggtactaaacttgagattaaacgggcagatgctgcaccaaccgtgagcatcttccccccatcatcagaacagctgacgagcggaggcgcgagcgtggtctgcttcctcaataacttctacccaaaggatatcaatgtgaagtggaaaatagacgggagcgagcgccagaatggagtgctcaactcttggacagaccaggatagtaaagacagcacctatagcatgagctcaaccctgacactgaccaaggacgaatacgaacggcacaattcttatacctgcgaggccacccataagacctctacctcacctatcgttaaatctttcaaccgaaatgagtgc

SEQ ID NO: 15137 - DNA, 711 bp, synthetic construct
  misc_feature 1..711: note = source = /note="Description of Artificial Sequence: Synthetic coding sequence"
  source 1..711: mol_type = other DNA
atggactttcaggtccaaatctttagctttctgctaatctctgcctccgtgattatttcaagagggcagattgtgctcactcagagtccagccattatgtccgcgtccccaggcgagaaggttacaatgacctgttctgctagctcctccgttacaagcatgcattggttccagcagaaaagcggcactagcccaaagcgttggatttacgatacatctaaactggcgtcaggggttccagctagattctccggctctggcagtggtacctcatactccctgactatcagcatcatggaggctgaggacgccgccacctattattgccagcagtggaattataaccctcctatggggacctttggagggggaacaaagctggagattaaacgtgccgacgcggccccaactgtttctatttttcccccatctagtgagcagctcaccagcggtggcgcgtccgtagtatgttttctcaataatttctaccctaaggacataaacgtgaaatggaagatcgacggaagcgagcgacagaacggcgtgctgaattcttggacagaccaagacagtaaggattctacctattccatgagctcaacactcacactcactaaggacgaatatgagcgtcataacagctatacttgcgaggcaacccacaagacatctacatctcctattgttaaaagtttcaatcggaacgagtgt

SEQ ID NO: 15138 - DNA, 711 bp, synthetic construct
  misc_feature 1..711: note = source = /note="Description of Artificial Sequence: Synthetic coding sequence"
  source 1..711: mol_type = other DNA
atggactttcaagtccagattttcagctttctgctgatttcggcatccgtaatcatatctaggggtcaaattgtgttgacccaaagccctgcgatcatgtcggcgagcccaggtgagaaggtgaccatgacctgcagcgctagctcgagcgtgacttctatgcactggtttcagcagaagtccgggacgtcacccaaacggtggatctatgacacctccaaactggcaagtggagtgccagcacggttttcaggaagtggctccgggactagctactctcttacgatttccataatggaggcggaagatgcagctacctactactgtcaacaatggaattacaatcctcctatgggtacctttgggggcggcacgaagttggaaatcaagagagcagacgcagcccctaccgtgtcgatctttccaccgtccagtgaacaactcacgtcgggaggcgcatccgtcgtgtgtttcctgaacaacttctaccccaaggacattaacgtcaaatggaaaattgatggatctgaacgtcaaaatggtgtgcttaactcatggaccgatcaggattccaaagatagcacttactcaatgtcctcgactcttactctcacgaaggatgagtacgaacgacataacagctatacttgtgaagctacgcataagacttccacctcccccatcgttaagtcgttcaatcgcaacgagtgc

SEQ ID NO: 15139 - DNA, 711 bp, synthetic construct
  misc_feature 1..711: note = source = /note="Description of Artificial Sequence: Synthetic coding sequence"
  source 1..711: mol_type = other DNA
atggacttccaggtgcagatcttctcctttctgctgatctcggcgtcagtcatcatttcgaggggccagatcgtgttgacccaatcgccggcaatcatgtccgcctcgcctggggagaaggtcactatgacgtgttcggccagctcatccgttacttcaatgcactggtttcaacagaaatccggaactagccctaagcggtggatctacgacacctcgaaacttgcatctggggtgccagccagattctcagggtccggatccggtacctcatactcgctcaccatcagcataatggaggccgaggacgctgcgacctactactgccaacagtggaactacaatccaccaatggggacctttgggggcggcaccaaattggagatcaaacgcgccgatgctgcgccaactgtgtcgatattcccaccgtcctccgaacagctgacgtccggaggagcatcggtcgtgtgctttctgaataacttctatccaaaggatatcaacgtgaagtggaagatcgatggaagcgaacgccagaacggagtcctgaactcgtggaccgaccaggactcaaaagattccacctactcgatgagctcgaccctcaccctgactaaggacgaatacgaacgccataacagctacacgtgcgaagcgactcacaagacttcgaccagcccgatcgtcaaatcgtttaaccggaatgaatgc

SEQ ID NO: 15140 - DNA, 711 bp, synthetic construct
  misc_feature 1..711: note = source = /note="Description of Artificial Sequence: Synthetic coding sequence"
  source 1..711: mol_type = other DNA
atggattttcaagttcagatatttagttttctccttattagtgcttccgttatcattagccgaggccaaatcgtcctaacacaaagtccggctataatgagtgcctcaccgggagaaaaggtcactatgacttgctccgcgagcagcagcgtcacgtcaatgcattggttccaacagaagagtgggacgtctcccaagcggtggatatatgacacgtcaaagttggcttctggggtgcctgcgaggttctccggttcgggttcgggaaccagttactccttaactattagcattatggaagcagaggacgctgcgacttattactgccaacagtggaactacaatccaccgatggggacgttcggaggcggtaccaagcttgaaattaaaagggcggatgctgctccgaccgtttcgatattcccgccgtcctccgaacaactcacgtcgggaggtgcgtccgttgtctgttttctgaacaacttttaccccaaggatattaacgtgaagtggaagatagacggtagcgaacggcagaatggagttttgaatagctggaccgatcaggactcaaaggactccacctatagcatgtcctctaccttgacgcttacaaaggacgagtatgaacggcataattcgtatacgtgcgaagcaacgcacaaaacctcgacctcgcccattgtcaagagtttcaaccgcaatgaatgt

SEQ ID NO: 15141 - DNA, 711 bp, synthetic construct
  misc_feature 1..711: note = source = /note="Description of Artificial Sequence: Synthetic coding sequence"
  source 1..711: mol_type = other DNA
atggactttcaggtgcaaatctttagctttcttctgatctccgccagcgtcatcatctcaaggggacagatcgtgctgactcaatctcctgcgattatgagcgcttctcctggcgaaaaggtgaccatgacatgctccgccagctctagcgtgactagtatgcattggttccaacaaaaaagcggcacaagcccaaagcggtggatctacgacacaagcaagctggcttctggcgtccctgcacgcttcagcggctccggcagcggcacatcttactctctaaccatttctatcatggaggccgaagacgctgccacatattactgccagcaatggaactacaaccccccaatgggaacctttggagggggcaccaagctggaaatcaagcgtgccgatgctgcgcctacagtgagcattttccctccaagctctgagcaactcacatccgggggagctagcgtggtctgcttcttgaacaatttctaccctaaagatatcaatgttaaatggaaaatagatggatctgagagacaaaacggtgtccttaactcatggaccgaccaggactctaaagactccacgtacagtatgagtagcaccttgacactcactaaagacgaatacgagagacataactcttacacttgcgaggcgacacacaaaacatccacaagccccatcgtcaagagcttcaaccgtaacgaatgc

SEQ ID NO: 15142 - DNA, 711 bp, synthetic construct
  misc_feature 1..711: note = source = /note="Description of Artificial Sequence: Synthetic coding sequence"
  source 1..711: mol_type = other DNA
atggacttccaggtccagatcttctcgttcctgctgatttccgctagcgtgatcatctctcgcggtcaaattgtcctgacccagtctccagccattatgtccgcgagcccaggtgagaaagtgaccatgacatgctccgcttcgtcctctgtgaccagtatgcactggtttcagcaaaagtcgggaaccagcccgaagcgctggatctacgatacctcgaaactggcctctggggtccctgcccggtttagcggttccggtagcggaacttcctacagtctcacaatcagcattatggaagctgaggacgcggctacatactactgccagcaatggaactacaacccacccatgggtactttcggtggcggcactaagctggaaattaagcgggcagatgccgctcctaccgtctctatcttccccccctcctccgagcaactcacctctggcggagcatccgtcgtgtgtttccttaacaacttttatcctaaggacattaacgttaagtggaagatcgacgggtccgaacgtcagaacggcgttttgaatagctggaccgatcaggactccaaggactccacgtattcgatgtctagtacactcaccctgacaaaggatgaatacgagcgacacaattcatacacctgcgaggccacgcacaagacaagcactagtcccatcgtcaagagttttaaccgcaatgaatgc

SEQ ID NO: 15143 - DNA, 711 bp, synthetic construct
  misc_feature 1..711: note = source = /note="Description of Artificial Sequence: Synthetic coding sequence"
  source 1..711: mol_type = other DNA
atggacttccaagtgcagatcttttcttttttactaatcagcgcatccgtgatcatcagcaggggccagatcgtgttgacacagtcgcccgccatcatgagcgcgtctcccggcgagaaagtgaccatgacatgttctgcctcaagttctgttaccagtatgcactggttccaacagaaaagtggtactagtcccaagcggtggatttacgatacctcgaagctggcttcgggtgtcccagccaggtttagtgggtccggcagcggcacctcgtactcactgaccatttctataatggaagccgaagatgccgcaacgtactattgtcagcagtggaactataaccctccaatgggcaccttcggcggaggaactaaactggaaattaagcgcgcagacgcagcaccaacagtgagcatattccctccctcctccgagcagttgacatccggcggggccagcgtagtgtgttttctgaataacttttaccctaaagacatcaatgtaaaatggaaaatcgacgggtccgagagacagaatggtgtgcttaactcttggacagaccaggacagcaaggactccacctactccatgagctcgaccttgactctcactaaggacgaatacgaacgacataatagctacacttgcgaggccacacataagacatccaccagtcccattgtcaagtcttttaaccgaaatgaatgc

SEQ ID NO: 15144 - DNA, 711 bp, synthetic construct
  misc_feature 1..711: note = source = /note="Description of Artificial Sequence: Synthetic coding sequence"
  source 1..711: mol_type = other DNA
atggactttcaggtacagatcttcagctttcttcttatcagcgccagcgtgataataagccggggacaaatcgtgttgacccaaagtcctgctattatgtctgcgagccctggcgaaaaggtaactatgacatgcagtgcctcctcttccgtcacaagtatgcattggtttcaacaaaagagcggcacaagtcccaagcgctggatttacgacacctcaaagctggccagcggggttccagcgagatttagtggtagcggaagcggaaccagctacagtctcaccatctctatcatggaggcagaagatgccgctacttattattgccagcaatggaactacaatccacctatgggtacgttcggcggcggtacaaagctcgaaatcaaaagggccgacgctgctcctaccgtctctatctttccaccgagcagtgagcaactgacaagcgggggcgcatcagttgtgtgcttcctgaacaatttctatccgaaagatatcaacgtgaagtggaaaattgacggaagtgagcggcaaaacggtgttcttaacagctggacggatcaggactccaaggatagtacctatagtatgagcagcaccttgacactgaccaaggatgagtacgaaagacacaactcttacacgtgcgaggcgacgcataaaaccagcacctcccccatcgttaaaagtttcaaccgaaacgagtgt

SEQ ID NO: 15145 - DNA, 711 bp, synthetic construct
  misc_feature 1..711: note = source = /note="Description of Artificial Sequence: Synthetic coding sequence"
  source 1..711: mol_type = other DNA
atggattttcaggtccagatattttcattcctcctgatatctgcctctgtaatcatatcacgcggacagatagtcctcacacagtccccagctattatgtccgcctcacccggagaaaaagtgacaatgacatgctccgctagttcctccgtgacttctatgcactggtttcagcagaagagtgggacaagtccaaaacgatggatatatgatacaagtaaactggcatccggggtccctgcaaggttctccggatctggatcgggaacttcttattcccttactatatctatcatggaggccgaagatgcagctacttactattgtcagcagtggaattacaaccctcctatggggacgttcgggggaggaactaagctggagattaaaagggcagatgcagcccctacagtgagtatctttcccccatcttcagaacaactcacatcagggggggcctccgtggtgtgtttcctcaacaatttttatccgaaagatatcaacgtgaaatggaaaatagatggatccgaaagacagaacggggtcctaaactcctggactgatcaggactccaaagattctacttattcaatgagttctacactgacacttactaaagatgagtatgaaagacataactcctacacgtgtgaggcgacacacaaaacatctacttccccaatcgtcaaatcattcaatcggaacgagtgt

SEQ ID NO: 15146 - DNA, 711 bp, synthetic construct
  misc_feature 1..711: note = source = /note="Description of Artificial Sequence: Synthetic coding sequence"
  source 1..711: mol_type = other DNA
atggactttcaagttcagatcttctctttcctactgatttccgcgtctgttattatctctcggggccagatcgttttgacccagtcaccggcgatcatgagcgctagtcctggtgagaaagttaccatgacgtgcagcgcctcgtcctcagtgaccagcatgcactggtttcaacagaagtctgggacgagtccgaaacgttggatctacgacacttctaaactcgcctccggtgtgccagcgcgtttttccggttccggctctggtacgtcgtatagcctcacaatttcaataatggaggcagaggatgcggcgacctactattgtcagcagtggaattacaacccgccgatgggaacgttcggtggcggcacgaagctggagatcaagcgtgcagatgctgcgcctaccgttagcatcttcccgccatccagcgagcagctgacgtctggtggtgcaagcgtcgtgtgctttttgaacaatttttaccctaaggatattaacgttaaatggaaaattgacggtagtgaacgacagaatggtgtgctcaacagctggaccgaccaagactctaaggacagcacctattctatgtcaagcactctgacgctgaccaaagatgaatacgagcgccacaactcctatacctgcgaagcgacccataaaacctcaaccagcccgatcgtgaagagcttcaatagaaatgagtgc

SEQ ID NO: 15147 - DNA, 711 bp, synthetic construct
  misc_feature 1..711: note = source = /note="Description of Artificial Sequence: Synthetic coding sequence"
  source 1..711: mol_type = other DNA
atggacttccaggtgcagatcttctccttccttctgatctcggcctccgtgatcatctcccgcggtcagatcgtgctgactcagagccccgccattatgtccgcctcacctggagagaaggtgaccatgacttgctcggcctcctcgtcggtgacttcaatgcactggttccagcagaagagcggaaccagcccaaaaaggtggatttacgacacttcaaagctggcctccggcgtcccggcccggttttcagggtcgggctccggcacctcctactcactgaccatcagcattatggaagccgaggacgctgctacttactactgccaacaatggaattacaatccgccaatgggaactttcgggggcggaacgaaattggagatcaagcgcgcggatgccgctccaaccgtgtcgatcttccctccgtcctccgaacagctgacctcaggcggagcttcagtggtgtgtttcctgaacaatttctatcccaaagacatcaacgtgaagtggaagatcgacggctcagagaggcaaaatggagtgctgaacagctggactgaccaggactctaaggattcaacctattcgatgtcgtcgaccctgacgctcacgaaagacgagtacgagcgccacaactcttacacttgcgaggccactcataagacttcgaccagcccgatcgtgaagagcttcaacagaaacgagtgt

SEQ ID NO: 15148 - DNA, 711 bp, synthetic construct
  misc_feature 1..711: note = source = /note="Description of Artificial Sequence: Synthetic coding sequence"
  source 1..711: mol_type = other DNA
atggatttccaggtgcagatatttagtttccttctgataagcgctagcgtgatcatctcccggggccagattgtgcttacccagtctccggccatcatgagcgcatctccaggtgaaaaagtgactatgacttgtagcgccagcagctcagtgacctctatgcattggttccagcaaaaatctggaacaagcccaaagcggtggatatacgataccagcaaactggcctctggcgtgccagcacggtttagtggtagcggaagcggcacatcttactcacttaccatatcaatcatggaagccgaagatgccgccacttactattgccagcagtggaactacaacccccccatgggcaccttcgggggaggcaccaagctagagattaagcgggccgacgctgcacctaccgtgagcatttttccacccagcagcgaacagcttaccagcggtggtgcatctgtggtctgtttcttaaacaacttctacccaaaggatattaatgtgaagtggaagatcgatggctcagagagacagaatggggtgttaaatagttggacagatcaggattccaaggacagtacctacagcatgtcctctaccctgacactgaccaaggatgagtatgagcgccacaatagctatacttgcgaggctactcataagacatctaccagtcctatagtgaagagcttcaatagaaacgaatgc

SEQ ID NO: 15149 - DNA, 711 bp, synthetic construct
  misc_feature 1..711: note = source = /note="Description of Artificial Sequence: Synthetic coding sequence"
  source 1..711: mol_type = other DNA
atggactttcaagtgcagatattctcttttctcctgattagcgcatccgtgatcatctccagaggccagattgtcttgacccagagccccgccatcatgtcggcttcgccaggcgaaaaggtgactatgacctgttccgcatcttccagcgtcacgagcatgcattggttccaacagaagtccggcacgtcgcctaagcggtggatctatgatacttccaagctggcatctggagtgccagcgagattttccggaagcggatccggaacttcgtactcgctgactatctcaatcatggaagctgaggacgccgcgacctactattgccaacaatggaattacaatccccccatgggcacgttcgggggaggaacgaaactcgagataaagagggccgatgcggcacccactgtgagcatttttcccccgagctccgaacagctgacctcgggtggggcttccgtcgtgtgttttctgaataacttttaccctaaggatatcaacgtgaaatggaagattgatggatcggagaggcaaaacggcgtgcttaactcgtggactgaccaagattccaaggattccacctactcgatgtcctccacccttacccttaccaaggatgagtacgaacgacataactcgtacacttgtgaggcgacccacaagacctccactagccctatcgtgaagtcgtttaatcgcaatgaatgt

SEQ ID NO: 15150 - DNA, 711 bp, synthetic construct
  misc_feature 1..711: note = source = /note="Description of Artificial Sequence: Synthetic coding sequence"
  source 1..711: mol_type = other DNA
atggacttccaggtgcagatattctcatttcttctgatttctgcatctgtaataattagccggggccagatcgttctcacccagtcccctgccattatgagcgccagccccggggagaaggttactatgacctgttccgcttcatctagcgtaacctctatgcattggttccagcaaaaatccgggacctcacctaagagatggatttatgataccagtaaactggcctcaggagttcccgctcgcttctccgggtccggaagcggaaccagttattccctgactatctctataatggaggcagaggacgctgccacctactattgtcagcagtggaactataatccacccatgggaacttttgggggaggtacgaaactggagatcaagcgggcagacgctgcgcccaccgtgagcatcttcccgccaagttccgagcagctgacgtctggcggcgcatccgtagtatgcttcctgaacaacttctacccgaaggatattaatgtgaaatggaaaatcgatggctctgagcgacagaacggtgtgctcaactcctggaccgaccaagatagcaaagacagcacatattcaatgagcagcacactcactctgacgaaggatgagtatgaaagacacaattcctatacctgtgaagccacacacaagacttccaccagtcccattgtgaaaagttttaaccggaacgaatgt

SEQ ID NO: 15151 - DNA, 711 bp, synthetic construct
  misc_feature 1..711: note = source = /note="Description of Artificial Sequence: Synthetic coding sequence"
  source 1..711: mol_type = other DNA
atggactttcaggtgcaaattttctcatttctcctgatttccgcttccgttatcattagcaggggacagatcgtactgacacaaagccccgctatcatgagcgcaagtcccggcgaaaaagtcaccatgacatgtagcgcttctagctctgtgaccagcatgcattggtttcagcagaaatccggaacgtcaccaaagaggtggatctacgatacatctaagctggcttccggtgtaccagctaggttcagcggctctggaagtggaacctcctacagtctgactattagcattatggaagcagaggacgcagctacttactactgccagcagtggaactataaccctcccatgggaacattcggaggaggaaccaagcttgaaatcaagagggccgacgcagcccccaccgtaagtatcttccctccctcttcagaacagttgacgtctggtggcgcgtccgtggtttgctttctcaacaatttctaccctaaggacatcaacgtcaagtggaaaatcgacggatccgagcgccagaatggtgtacttaattcttggaccgaccaagactcaaaggactccacctattccatgtcctccactctgacgcttacaaaagacgaatacgaaagacacaatagctacacatgcgaggcaactcacaagacttcaacatcaccaatcgttaagtcctttaacaggaatgagtgc

SEQ ID NO: 15152 - DNA, 711 bp, synthetic construct
  misc_feature 1..711: note = source = /note="Description of Artificial Sequence: Synthetic coding sequence"
  source 1..711: mol_type = other DNA
atggatttccaggttcagattttttcttttctgctcatcagtgcctccgttattatttctcgcggccagatcgtgctgacccagagccctgctataatgtcagccagtcctggcgagaaagtgaccatgacttgttctgcatcttcaagcgtcactagcatgcactggtttcagcagaaatcggggacctcccccaagagatggatatacgatacgagtaaattggcatccggggtgccggctagattttccgggtccgggtccggaaccagctacagtctgacaattagcataatggaagccgaggacgccgcgacttattactgtcaacaatggaactataaccccccaatgggtacattcggaggtgggaccaaattggagatcaagagagccgatgcggcccctacggtttccatcttccccccaagctcagagcagctgacttccggaggcgcctccgttgtctgctttctcaataacttttatccgaaggacataaacgttaagtggaaaatcgatggttccgaaaggcagaatggtgtgctcaactcctggaccgatcaggacagtaaagacagcacctattccatgtctagtacattaacactgactaaggatgagtatgagcggcacaattcgtatacctgcgaggcaactcacaagacgagcacctctccgatcgtaaagagcttcaataggaatgaatgt

SEQ ID NO: 15153 - DNA, 711 bp, synthetic construct
  misc_feature 1..711: note = source = /note="Description of Artificial Sequence: Synthetic coding sequence"
  source 1..711: mol_type = other DNA
atggacttccaggtgcagatcttttcatttctgctgatttccgccagcgtgatcatctctaggggccagattgttctgacgcagtccccagctatcatgagcgcgagtcctggcgagaaagtgacgatgacctgctccgcgtccagttctgtgacgagcatgcattggttccagcaaaagtcggggacctcccccaagcgatggatttatgacacatccaagctcgcttcaggtgtccctgcccgcttttccggctctggaagcgggaccagttactccctgaccatttcaataatggaagccgaagatgccgccacttactactgtcaacagtggaactataacccaccgatgggcacttttggcggtggtacaaaattagagatcaagcgggctgatgccgctccgactgtgtctatctttccaccttcaagcgagcaactgacgagcggaggcgctagcgttgtttgtttcctcaacaacttctaccccaaggacatcaacgttaaatggaaaattgacggatccgagaggcagaacggtgtgttgaattcttggacagatcaggattccaaagattctacgtactctatgtcctcgaccctcaccctgacaaaggacgaatacgaacgacataactcctatacctgtgaggcaacacataagactagtacatcacccatcgtgaagtcttttaaccggaacgagtgc

SEQ ID NO: 15154 - DNA, 711 bp, synthetic construct
  misc_feature 1..711: note = source = /note="Description of Artificial Sequence: Synthetic coding sequence"
  source 1..711: mol_type = other DNA
atggacttccaggtccagattttctcgttccttcttatctcagcaagcgtgatcattagccgcgggcagattgtgttgacccaatcgcctgcaattatgtctgcctccccgggtgagaaggtgactatgacgtgttcggccagctcctcggtcacgtccatgcactggtttcaacagaagtccgggacttcgcctaagcgctggatttatgatacttctaaactggcgagcggagtgccagcacggttctcaggatcgggaagcggtaccagctactcacttaccatctcgatcatggaggcggaggatgccgctacctactactgtcaacagtggaattacaacccccctatgggtacgtttggcggcggcaccaagctggaaatcaagcgagcggatgcagcgcccaccgtgtccatcttccccccttcatccgaacaactcacgtcaggtggagcctctgtggtgtgttttctgaataacttctacccaaaggacatcaacgtgaaatggaaaatcgatggttcagaacgtcaaaatggagtgcttaattcctggactgatcaagactcgaaagattccacttactccatgtcctcgactctgaccctgacgaaagatgaatacgagcggcataattcttacacgtgcgaagcaactcataagacgtcaactagcccaattgtgaagtcattcaacagaaacgaatgc

SEQ ID NO: 15155 - DNA, 711 bp, synthetic construct
  misc_feature 1..711: note = source = /note="Description of Artificial Sequence: Synthetic coding sequence"
  source 1..711: mol_type = other DNA
atggactttcaagttcaaattttcagctttctcctgatttcagctagcgttatcatcagcagaggccagatcgtattgacccagtctccagctatcatgtctgcatcgccaggcgagaaggtgaccatgacctgttctgcctcaagctccgtcacttcaatgcactggtttcagcagaagagcgggacctcgccaaaacgctggatttatgataccagtaaactggctagtggagtgcctgcccggttctcgggctctggtagcggaacatcatattcattgaccatctctataatggaagccgaagatgcagctacctactactgtcagcagtggaattataaccctcctatgggcacatttgggggaggcaccaaactcgaaattaaaagagccgatgccgctccaactgtttccatttttcccccctcttccgaacagcttacaagcggaggcgcaagcgtcgtgtgctttctgaacaatttctaccctaaagatatcaatgtcaaatggaagatcgatggctctgagagacagaatggagttctgaacagctggacggatcaagattccaaggatagcacctattctatgagttcgacgcttacactgaccaaggacgaatatgaacgccacaatagttacacatgtgaagccacgcacaaaacttcaactagcccgatagttaagagttttaacaggaacgaatgt

SEQ ID NO: 15156 - DNA, 711 bp, synthetic construct
  misc_feature 1..711: note = source = /note="Description of Artificial Sequence: Synthetic coding sequence"
  source 1..711: mol_type = other DNA
atggactttcaggtccaaatcttctccttcttgcttatatcagcttcggtgatcatctccagggggcagattgtattgacgcagtctccagcaatcatgtctgcgtcacccggtgagaaggtaaccatgacctgttctgcctccagctcagtcacgagtatgcactggtttcaacagaagagcggtactagccccaagaggtggatctatgacacgtccaagttggccagtggcgtgcccgccaggttctcaggcagcggatccggtacctcttattctttgacgatctccatcatggaggccgaagacgccgctacttattactgtcaacagtggaactacaatcccccaatggggacctttggaggtggcaccaaattggagattaagcgggcggatgccgcgcctactgtgtccatcttccctcccagctctgagcagctcacctctggaggggccagcgtcgtgtgtttcctgaacaacttttaccccaaagatattaatgtgaagtggaagatagatggcagtgaacgccagaacggagtactgaattcgtggacagatcaggactctaaagacagcacttattccatgtcatccactttgactcttaccaaggatgaatatgagcgacacaacagctacacttgcgaggccactcataaaaccagcacctcgcccatagtaaagagcttcaacaggaacgaatgc

SEQ ID NO: 15157 - DNA, 711 bp, synthetic construct
  misc_feature 1..711: note = source = /note="Description of Artificial Sequence: Synthetic coding sequence"
  source 1..711: mol_type = other DNA
atggactttcaggtccagatattctcatttctgctgatatcagcatctgttatcattagtagaggtcagattgttctgacacagtcaccagcgatcatgtcagccagtcctggcgaaaaggtgactatgacttgtagtgcatcaagcagcgtcactagcatgcactggttccagcagaaaagcggaacgtcaccaaaacgatggatctatgatacctctaagctcgcgtccggcgtgccggcacgctttagcgggagcggaagcggaactagttattctctaactatttccatcatggaggcggaagatgcagccacatactactgccagcagtggaattacaatcctcctatggggacatttggtggagggactaaacttgagataaagcgagctgacgccgcaccaacagtgtccatctttccaccatcttctgaacagttaacttctggcggggcaagcgtggtatgttttctgaacaatttttatccaaaggatatcaacgtgaagtggaagatcgacggatccgaacgccagaacggggtgctgaacagctggaccgatcaggatagcaaggattccacctattccatgtcaagcactttgacattgaccaaggacgagtatgagcgacacaacagttacacttgcgaggcaacgcataagacaagtacatctcccatcgtgaagtctttcaacagaaacgagtgt

SEQ ID NO: 15158 - DNA, 711 bp, synthetic construct
  misc_feature 1..711: note = source = /note="Description of Artificial Sequence: Synthetic coding sequence"
  source 1..711: mol_type = other DNA
atggacttccaggtgcagatctttagcttcctgcttatctcggcttctgtgatcattagccgcggccaaatcgtgttgactcagtcgcctgcgatcatgtcagcttccccgggggaaaaagtcactatgacgtgctccgcctcgtcatccgtcacctccatgcactggttccaacagaaatcgggaacttcacctaagcgctggatttacgacacctcaaagctggcgagcggtgtgccagcacgcttctccggctcgggttcgggaaccagctattcactcacgatcagcatcatggaggctgaggatgcagcgacctactactgccagcagtggaattacaacccgcctatgggtaccttcggcggggggactaaactggaaatcaagcgcgccgacgcggccccaactgtgtcgattttccctccgagctccgaacaactgacttcagggggagcctcggtggtgtgcttcctgaacaacttctaccccaaggacattaacgtcaagtggaagattgatggatccgagcggcagaacggggtgctgaatagctggactgaccaagactccaaggacagcacttactcaatgtcctcaaccctgaccctgaccaaggacgaatacgaacgccacaattcatatacgtgcgaggccactcacaaaacctcaacctcacccatcgtgaagtcattcaataggaacgaatgc

SEQ ID NO: 15159 - DNA, 711 bp, synthetic construct
  misc_feature 1..711: note = source = /note="Description of Artificial Sequence: Synthetic coding sequence"
  source 1..711: mol_type = other DNA
atggactttcaggtccagatcttcagttttctactgatcagtgcgtccgttataatcagccgcgggcagattgtgctgacccagtctccggcaattatgtcggctagccccggtgaaaaagtgacaatgacatgctccgcatcgtcatctgttacatcaatgcattggttccagcaaaaaagtggtactagtccaaaacgatggatctacgacacttccaaactggcatccggggtgcctgctcgcttctccgggtccggctctggtacatcctacagcctgactattagcatcatggaggccgaggacgccgcgacttactactgtcagcaatggaactacaatcccccaatggggactttcggcggagggaccaagctagagatcaagagggcagatgctgcccccacggtatccatctttccgccctcatccgagcagctgacctcaggcggggcttctgtagtgtgtttcctcaacaatttttaccccaaagacattaacgtaaaatggaaaattgacggaagcgagaggcagaatggcgtccttaattcttggacagaccaagactcaaaagattctacatactccatgtcttctaccctgaccctcactaaggatgaatatgagaggcacaactcttacacttgcgaagcaactcataaaacatccacttctcctatcgtcaaatctttcaaccgtaacgagtgc

SEQ ID NO: 15160 - DNA, 711 bp, synthetic construct
  misc_feature 1..711: note = source = /note="Description of Artificial Sequence: Synthetic coding sequence"
  source 1..711: mol_type = other DNA
atggattttcaggtgcaaattttttcctttcttctgatttccgctagcgttattatctctaggggacaaatcgtgctgacacaatcacctgccatcatgagtgcttccccgggcgagaaagttacaatgacatgcagcgccagttcttcagtgacaagcatgcactggtttcagcagaagagtggaacaagccccaagcggtggatatacgatacctccaagctagcatcaggcgtgccagccagattctcaggctccggaagtgggacatcctactctctgactatcagtatcatggaggccgaggacgcggcaacttattattgccagcagtggaactataaccctcctatgggcacttttggaggcgggactaagctggagataaagcgtgcagatgcagcacctaccgtttccatcttcccacctagcagcgaacagctaaccagtggcggggcatcagtcgtttgttttctgaacaacttctacccaaaagacattaacgtcaaatggaaaattgatggatcagagcgccagaatggggttctgaattcctggactgaccaggatagtaaagattccacctactcgatgtcttccacactcacccttacgaaggatgagtatgagcggcacaattcctacacatgtgaagcaacccataagacatctacaagtcctatcgtaaagtcatttaaccggaatgaatgt

SEQ ID NO: 15161 - DNA, 711 bp, synthetic construct
  misc_feature 1..711: note = source = /note="Description of Artificial Sequence: Synthetic coding sequence"
  source 1..711: mol_type = other DNA
atggacttccaagtgcagattttttcattcctcctgatcagtgcttctgtcataatatcacggggacagatcgtcctgacccagtcccctgccatcatgagcgcctctcccggtgaaaaagtcacaatgacctgttctgcctcatctagtgtcaccagcatgcattggttccagcagaagagtgggacatcccccaaaaggtggatctacgatactagcaagctagcaagcggagtcccggctaggttcagtggctccggcagcggcacatcttacagcctgactatttctatcatggaggccgaggacgctgccacgtattattgtcagcagtggaactataacccacctatgggaacctttggcggtggcacaaaattagagataaaacgggccgacgccgcgccaactgtatccatcttccccccttcaagcgagcagctgacctccggcggagcgtctgtcgtgtgtttcttaaacaatttctatcccaaggatatcaatgtcaagtggaaaatcgacgggagtgaaaggcagaacggagttttgaactcctggacggatcaggatagtaaagacagcacatactccatgagcagcactctcactctgacgaaagacgagtacgaacgccacaatagttacacgtgcgaagccacgcataagaccagtacatcccctattgttaagtccttcaatagaaacgaatgc

SEQ ID NO: 15162 - DNA, 711 bp, synthetic construct
  misc_feature 1..711: note = source = /note="Description of Artificial Sequence: Synthetic coding sequence"
  source 1..711: mol_type = other DNA
atggacttccaggtgcagatctttagcttcctgctgatttccgctagcgtaatcatttctagaggacagatcgtgcttacacagagcccggctatcatgtccgcctcccctggagaaaaggtcacaatgacatgttcggcctcaagttccgtgacttccatgcattggttccagcagaagtccgggacgtcaccgaaaaggtggatctatgacacttcaaaactggcgtcaggagtcccagcacgatttagcggctcaggcagcgggacatcctacagcctgactatttctattatggaggctgaggacgccgccacctattactgccagcagtggaattacaatccaccaatgggtaccttcggaggaggaacgaaattggaaattaagagggcagacgctgcacctacggtctccatcttccccccgtccagcgaacaattaacatcaggaggcgcaagcgtcgtctgttttctgaacaacttttaccccaaggatataaatgtgaaatggaagattgatggatccgagcgacaaaatggtgtgcttaattcttggactgatcaagacagcaaagattccacttatagtatgagcagtactctcacccttactaaggatgaatatgagcggcacaattcctacacctgcgaggcaactcataagacgagcacatccccaatagtaaagagcttcaaccggaacgaatgc

SEQ ID NO: 15163 - DNA, 711 bp, synthetic construct
  misc_feature 1..711: note = source = /note="Description of Artificial Sequence: Synthetic coding sequence"
  source 1..711: mol_type = other DNA
atggacttccaagtccaaatcttcagcttcctgctcatctcagcatccgtgatcatctcgcggggacaaatcgtccttactcaatcgcctgcgattatgtcggcctctccaggagagaaagtgaccatgacctgctcggcgtcatcgtcagtcacgagcatgcactggttccaacagaagtctggcacttcacccaagcgctggatctacgacacgtcgaaactcgcatccggagtgccagcccgcttctctggaagcggctcaggaacctcgtattccctgaccatctcgatcatggaagccgaggatgcagcgacctactactgtcaacaatggaattacaacccccctatgggcacctttggagggggcactaagctcgagatcaaacgggcggacgccgctcctaccgtgtccattttcccgccgtcctcagagcagctgacctctggtggggcatcggtggtgtgcttcttgaacaacttttacccaaaagacatcaacgttaagtggaaaatcgacgggagcgagagacagaacggagtcctcaatagctggaccgaccaggactccaaggacagcacctacagcatgtcctccactctgactctcacgaaggacgaatacgagcgccacaactcctacacctgcgaggcgacccacaagacctccaccagcccaatcgtgaaatcatttaaccggaacgagtgc

SEQ ID NO: 15164 - DNA, 711 bp, synthetic construct
  misc_feature 1..711: note = source = /note="Description of Artificial Sequence: Synthetic coding sequence"
  source 1..711: mol_type = other DNA
atggatttccaggtgcaaatcttctccttcctgttgatttccgcatccgtaattatctcgcgcggtcagatagtgttgacgcaatctcccgccataatgagcgcttcacctggagagaaggtgaccatgacctgtagcgccagctcctccgttacatcaatgcactggtttcaacaaaaatccggaacgagccccaaaaggtggatctacgacacttccaagctggcgagcggcgtgcctgctcggttcagcggctcaggatctggtacctcctatagcttaaccattagcattatggaagccgaggatgcggctacatactactgccagcagtggaactacaacccaccaatgggcaccttcggtggaggaactaaactagagatcaaacgggccgacgcagccccaacagtgtcgattttccccccttcctcagagcagttgacgtctgggggcgcgtcagtggtgtgttttctgaacaacttttatcctaaggacatcaatgtgaagtggaaaatagacgggagtgaacgacagaatggcgtcttaaactcttggaccgaccaagactctaaggatagtacctactcaatgtcctcaacgttgaccctgaccaaagatgagtatgagcggcataactcttatacctgtgaggctacacataaaaccagcacttcccctatcgtgaaatcttttaatagaaatgagtgt

SEQ ID NO: 15165 - DNA, 711 bp, synthetic construct
  misc_feature 1..711: note = source = /note="Description of Artificial Sequence: Synthetic coding sequence"
  source 1..711: mol_type = other DNA
atggacttccaagtccagatcttctcttttctgctcatctccgcgtccgtgatcattagccgcggccaaatcgtcctgacccagtcacctgccatcatgtccgcgtcgcctggagagaaagtgacgatgacctgcagcgcatcatcgtccgtgaccagtatgcattggtttcagcagaaaagcggaacctcgccgaaacgctggatttacgacacttcaaaactggcgtccggagtgccggcgcgcttctccggatcgggatcaggcacctcttacagcttgaccatttcgattatggaagcagaagacgccgctacctactactgccaacaatggaattacaatcctcctatgggtactttcggaggcggcaccaagctcgaaatcaagagagccgacgccgctccgaccgtgtcgattttcccaccgtcgagcgagcagttgacctcaggcggagcttcggtcgtttgcttcctgaacaacttctaccctaaggatattaacgtgaagtggaagatcgacgggtcagagcgccaaaacggcgtgttgaacagctggaccgatcaggacagcaaggattccacgtactcgatgtcgagcactctgaccctgacgaaggacgaatacgagcggcataattcctacacgtgcgaagcaacgcacaagaccagcactagcccgatcgtgaaatcctttaatcggaacgagtgt

SEQ ID NO: 15166 - DNA, 711 bp, synthetic construct
  misc_feature 1..711: note = source = /note="Description of Artificial Sequence: Synthetic coding sequence"
  source 1..711: mol_type = other DNA
atggatttccaagtccaaatattctcttttctcttaatcagcgctagcgttatcattagtagaggacagattgtcctcacccaatcgccggccatcatgtctgcatcccctggggaaaaagtcacaatgacatgcagtgcaagcagctccgtgacatcaatgcattggtttcagcaaaagtccggtacatcacctaaaaggtggatttacgatacgagcaagctagccagtggcgtaccggcgcgtttcagcggatcaggcagcggcacatcatatagtctgacgatcagtatcatggaagctgaagatgcggcaacatattattgtcaacagtggaattataacccgccgatggggacttttggggggggcactaagttggaaataaaaagggccgatgctgctcctactgtcagcatttttccaccgagctcagaacagttgacgagtggaggtgcgagtgtagtctgttttctaaataacttttatccgaaagatatcaatgtgaagtggaaaattgacggttcagaaaggcagaatggagtcttgaattcctggacggaccaggattctaaagactctacatacagtatgtcgtcaacactgacactgacgaaagatgaatatgaacggcacaacagctatacatgcgaagcgactcacaaaacttcaacttctccgattgtaaagagctttaaccgtaatgaatgt

SEQ ID NO: 15167 - DNA, 711 bp, synthetic construct
  misc_feature 1..711: note = source = /note="Description of Artificial Sequence: Synthetic coding sequence"
  source 1..711: mol_type = other DNA
atggacttccaggttcaaatcttcagttttctgcttatatctgccagtgtaatcatctctagaggccagatcgttctgacacagagcccggcgattatgagcgcatcccctggtgagaaggtaacgatgacctgctcggcttcaagcagcgtgacctcaatgcactggtttcagcagaagtccgggacctctcccaaacgatggatctacgatacctcaaaattggcaagtggagttcctgcgcggttctccggtagcggttccggaactagctactcccttacaatctccatcatggaggccgaagacgccgccacctattactgccagcaatggaattacaaccctccaatggggaccttcggaggaggtacaaaactcgagattaaaagagcagacgcggctcccacggtgagtatcttccctccctcgagcgaacagctgacttcaggcggcgccagcgttgtatgcttcctgaacaacttttatccaaaggatatcaacgtgaagtggaagatcgatggaagtgaacgacagaatggggtgcttaactcctggaccgatcaggatagcaaggacagtacatacagtatgagcagcaccctgacgctgaccaaagatgaatacgagcgccataattcctatacatgtgaagctacccataagacttcaactagccccatcgttaaatcttttaacagaaatgagtgc

SEQ ID NO: 15168 - DNA, 711 bp, synthetic construct
  misc_feature 1..711: note = source = /note="Description of Artificial Sequence: Synthetic coding sequence"
  source 1..711: mol_type = other DNA
atggatttccaggtgcagatcttctctttcctgctgatttccgcttccgtgatcatcagccgcggccagattgtgctgacccagtcgccggcgataatgtctgcttcccccggcgaaaaagttacaatgacatgcagcgccagtagttccgttacatctatgcactggtttcagcagaagtccggcacctcgccaaagcggtggatctacgacacgtctaaactagcatctggcgtgcctgcccgatttagcggatctgggtccggcacttcttactcgctgacaatatccattatggaagccgaggacgcagctacctattactgccaacaatggaactataatccccccatggggacattcgggggtggaaccaagctagagataaagcgggccgacgccgcacccacagtaagcatctttcccccctctagtgagcagctaacgtcggggggcgcatctgttgtctgctttttaaataatttctatccaaaagatatcaacgtgaagtggaagatagatgggtctgaacgccagaacggcgtgttgaattcttggacagaccaggattccaaggacagcacatacagcatgagcagtactctaactctcactaaagacgagtacgaacggcacaacagttacacatgcgaagctacacataagaccagtactagccctatagtcaagtccttcaaccgcaacgagtgt

SEQ ID NO: 15169 - DNA, 711 bp, synthetic construct
  misc_feature 1..711: note = source = /note="Description of Artificial Sequence: Synthetic coding sequence"
  source 1..711: mol_type = other DNA
atggattttcaggtgcaaatctttagtttcctgctgatctcggcatctgtcatcatttctcgaggtcaaattgttctcactcagtccccagcaattatgtcagcctcgccgggagaaaaagtgaccatgacctgctcggcctcgtcatccgtcacgtcaatgcactggtttcaacaaaaatctggtacttcgccaaagagatggatttacgatacctcaaagctggcctcaggagtcccggcaaggtttagcggcagcggtagcgggacctcgtactcgctgacgatttcgatcatggaggcagaggatgccgcgacctattactgtcaacagtggaactacaaccctccaatgggtactttcggaggagggaccaagctcgaaatcaagcgcgcggatgctgcgccgacggtttcgattttccctccatcgtccgagcagttgacctccggaggcgcgtcggtggtgtgttttctcaataacttttaccccaaggatatcaacgtgaaatggaaaatcgacgggtctgagcgccaaaatggtgtgcttaattcatggactgaccaggatagcaaggattccacgtacagcatgagctccaccctgacgctgacgaaggacgaatatgagcgtcacaactcctacacctgcgaggctactcataagacctcaacttcccccattgtcaagagcttcaacagaaatgaatgt

SEQ ID NO: 15170 - DNA, 711 bp, synthetic construct
  misc_feature 1..711: note = source = /note="Description of Artificial Sequence: Synthetic coding sequence"
  source 1..711: mol_type = other DNA
atggattttcaggtgcagatcttctccttcttgctcatctcagcttcagtcatcattagcagaggccaaattgtgctgactcaatctcctgcgattatgtcagcatcccccggtgaaaaggttaccatgacctgctcagcctcatcatccgtaacttccatgcactggtttcaacagaagtcagggacctcaccaaaacgctggatctacgatacaagcaaacttgcttcgggggtaccagcacggtttagcggcagcggtagcggcacatcatactcattaacaatttctatcatggaagcagaggacgctgccacgtattactgtcagcagtggaactataatcctccgatggggacattcggaggcggaaccaagctcgaaattaagcgggccgatgccgctccgacagtcagcatctttccaccctcctccgagcagcttacgtcaggcggcgccagtgttgtttgtttccttaataatttctaccctaaagacataaatgtgaaatggaaaattgacggttctgaacgccagaatggagtgctgaacagctggaccgaccaggacagcaaggacagcacttactccatgtcatctaccctaaccctgactaaagacgaatacgagcgacacaatagttacacctgcgaagctacacacaagacctctacatcacccatagttaagagtttcaaccggaatgagtgt

SEQ ID NO: 15171 - DNA, 711 bp, synthetic construct
  misc_feature 1..711: note = source = /note="Description of Artificial Sequence: Synthetic coding sequence"
  source 1..711: mol_type = other DNA
atggatttccaggtgcagatcttctcgttcctcctgatctccgcgtcggtgattatctcaagaggccaaatcgtgctcactcagtccccggcgatcatgtcggccagccctggagaaaaggtcaccatgacttgctccgcctcctcaagcgtgacttctatgcattggttccagcaaaagagcgggacgtcaccgaagcggtggatctacgacactagcaaactggctagcggagtcccggcacggttctccggaagcggttctggaacctcctattccctgaccatctccatcatggaagcggaggacgcggcgacttactactgccagcagtggaactacaatccgccgatgggcacctttggaggcggaactaagctggagatcaagcgcgccgatgccgccccaaccgtctcgatcttcccaccatcatcggaacagttgacttcaggaggtgccagcgtggtgtgtttcctcaacaatttctacccgaaagatatcaacgtcaagtggaagatcgatggctccgaaagacagaacggggtcctgaattcgtggaccgatcaagactctaaggacagcacttactctatgtcctccactctcactcttaccaaggacgagtatgagcggcataattcatacacctgcgaggcgactcataagacctcaacttcgccgatcgtcaagtcgttcaatcgcaacgagtgc

SEQ ID NO: 15172 - DNA, 711 bp, synthetic construct
  misc_feature 1..711: note = source = /note="Description of Artificial Sequence: Synthetic coding sequence"
  source 1..711: mol_type = other DNA
atggacttccaagtccagatcttctcgttcctcctgattagcgctagcgtgatcatctcacgaggacagatcgtcctgactcagtctcccgccattatgtccgcgagccctggcgaaaaagtcactatgacctgctccgccagcagctcggtgacttccatgcactggtttcaacaaaagtcaggaacttcacccaagcgctggatctacgatacttccaagctcgcctcaggcgtgccggcgcgattctcgggatcagggtccggaacgtcgtactcgctgaccatctcgatcatggaagctgaggacgccgcgacctactactgccagcaatggaactacaacccacctatgggcaccttcggagggggaaccaaactcgaaatcaagcgcgccgacgccgctccgaccgtgagcatcttcccaccatcgtccgagcagctgacttctggtggggcgagcgtggtctgcttccttaacaacttttacccgaaggacattaacgtgaagtggaagatcgacggatcggaacgccagaacggggtcctcaatagctggaccgatcaggattcgaaagactcgacctacagcatgtcgtcgactctgaccttgacgaaggatgagtatgaacggcacaattcctacacttgcgaagcgacccataagacctcgacttcaccgatcgtgaaatccttcaaccgcaacgagtgt

SEQ ID NO: 15173 - DNA, 711 bp, synthetic construct
  misc_feature 1..711: note = source = /note="Description of Artificial Sequence: Synthetic coding sequence"
  source 1..711: mol_type = other DNA
atggattttcaggtgcaaatattctcattcctccttatcagcgccagcgtgatcatcagcaggggccagatagtcctgacacagagcccggcaatcatgtctgcatcccctggcgaaaaggtgaccatgacctgtagtgcttcctcctccgttacctctatgcactggtttcaacagaaatccggaacatccccaaagagatggatttacgacacgagtaagctggctagcggggtgcccgccaggttcagtggctctggctccgggacaagttacagcctcactatttcaatcatggaggccgaggatgcagccacctactactgccagcagtggaattacaaccctcccatgggtacattcggaggtggtaccaaactggagatcaaacgggcagatgcggctccaaccgtgtctatctttccaccttcgtctgagcagttaacctccggcggagcatcagtggtgtgtttcctaaataacttctaccctaaagatatcaacgtaaaatggaaaatagatggatcggaaaggcagaacggtgtgctgaactcctggaccgatcaggattccaaagactcaacctatagcatgagtagcacccttaccctgacaaaagacgagtatgagcgccacaacagctacacttgcgaggcaactcacaagacaagcacctctcccatcgtgaaatcattcaaccggaacgagtgt

SEQ ID NO: 15174 - DNA, 711 bp, synthetic construct
  misc_feature 1..711: note = source = /note="Description of Artificial Sequence: Synthetic coding sequence"
  source 1..711: mol_type = other DNA
atggacttccaagttcagatattcagtttcttgctcatttctgctagtgtgatcattagtaggggtcagatcgtgctcactcaatctcccgctattatgtccgcttccccaggagagaaagttactatgacctgttctgcttcctcctcagtcacttccatgcactggttccagcagaaaagtggtacttcccccaaacgttggatttacgacacctcaaaactggcctccggagtgcccgccagattcagcggttccggaagcggcacttcttactccctgaccatttcaatcatggaggcagaggacgctgcaacctactattgtcagcagtggaattacaatcctcccatgggtactttcggaggtggaaccaagttggagatcaagcgcgccgatgctgctcccactgtgagcatctttcctcccagctccgaacaattgactagtggtggtgcatccgtagtgtgcttcttgaacaatttctacccaaaggatataaacgtcaaatggaagattgatggttccgaaagacagaatggcgtactgaactcttggacagaccaagactcaaaagacagcacctacagcatgtcatctaccctgacccttaccaaggacgaatacgagagacacaactcctacacctgcgaggccactcataagacctccacttctccaatagttaagagctttaatagaaacgagtgc

SEQ ID NO: 15175 - DNA, 711 bp, synthetic construct
  misc_feature 1..711: note = source = /note="Description of Artificial Sequence: Synthetic coding sequence"
  source 1..711: mol_type = other DNA
atggatttccaggtgcaaatcttcagcttcctgctgatatccgcatcagtgatcatttcgcgaggccagatcgtactgacccaaagtcccgcaataatgtcagcgagtccaggcgaaaaagtgacgatgacgtgttcggcgtcctccagcgtaacctccatgcactggtttcagcagaaatccggcacctccccaaagcggtggatctacgacaccagcaagctggcctccggcgttccggcccgattctcgggctctggctccggtaccagctacagcttgactatctccataatggaggcagaggatgccgccacgtactactgtcagcagtggaactataatccgccgatgggcacctttggaggaggtacgaagctcgaaatcaagcgtgcagatgccgctccgacggtttccatcttccccccatcctccgaacaactcacgagtggtggcgcctccgtcgtgtgctttctcaacaacttctatccgaaggacattaatgttaagtggaagatcgatggttccgagcgtcagaatggagtgctgaactcttggacggatcaagactcaaaggatagcacctacagtatgtcctccactcttacgttgacgaaggatgagtacgagaggcacaactcttacacctgtgaagccactcacaagacgtcgacctcgcctattgtcaagtctttcaataggaatgaatgc

SEQ ID NO: 15176 - DNA, 711 bp, synthetic construct
  misc_feature 1..711: note = source = /note="Description of Artificial Sequence: Synthetic coding sequence"
  source 1..711: mol_type = other DNA
atggattttcaggtccagattttttcttttctgctgatttcggcaagcgtcatcattagccgtgggcagatcgtgctgacgcagagcccagcgattatgtcagccagccctggggagaaggtgaccatgacatgctcagcatcgtcgtccgtcacctcaatgcattggttccagcagaaatccggtacgtctccaaaacggtggatttacgacacttcaaagctagcaagtggtgtacccgcacgattctccggttccggatccggcacctcttacagcctcaccattagcatcatggaagccgaagatgcggctacatactattgtcagcagtggaactataatccccccatgggcacattcggcggcggtaccaaattagagataaaaagagcagacgccgctccaaccgtctctatctttcctccatccagcgagcaactgacaagcggcggggcctctgtggtctgcttcctgaataacttttatccaaaggatattaacgtcaaatggaagatcgatggcagtgaaaggcagaacggagttctgaattcctggactgaccaggactctaaagattctacctacagtatgtcctctactctgaccctgacaaaggatgagtacgaaaggcacaatagttacacctgcgaggccactcacaaaactagtacctcccccatcgtaaaaagctttaatcggaatgagtgc

SEQ ID NO: 15177 - DNA, 711 bp, synthetic construct
  misc_feature 1..711: note = source = /note="Description of Artificial Sequence: Synthetic coding sequence"
  source 1..711: mol_type = other DNA
atggactttcaagtgcagatcttctcctttcttctcatctcagcatccgtgattatcagccggggacagattgtgcttactcagtcaccagcgattatgagcgcatcccctggagagaaagtgactatgacctgctcagcgagttcgtcagtcacctctatgcattggtttcagcaaaaaagcggtaccagccctaagcggtggatttacgataccagcaagctggcaagcggagttcccgcaagattctcgggatccggatcgggaacttcctactcccttactatttcgatcatggaagcggaagatgccgccacttattactgtcagcaatggaactacaatccacccatgggcactttcggagggggtactaaactcgaaatcaaaagagcagatgccgcacctaccgtctcaatcttcccaccttcatcagagcagttgacttcaggtggggcctcagtggtgtgctttctcaataacttctaccccaaggacatcaacgtgaagtggaaaattgatggatcggaacgacaaaacggggtcctgaactcgtggactgaccaggacagcaaggattccacctactcgatgtcgtcgactcttactctgaccaaggatgagtatgagcgccataacagctacacgtgtgaggcaacccataagacttccacgagcccaatcgtgaagtcattcaatagaaacgagtgc

SEQ ID NO: 15178 - DNA, 711 bp, synthetic construct
  misc_feature 1..711: note = source = /note="Description of Artificial Sequence: Synthetic coding sequence"
  source 1..711: mol_type = other DNA
atggactttcaggttcaaatattctcattcctgctgattagtgcttctgtgataatctcacgaggccagatcgtgctgacacagtcccctgcgattatgtcagccagcccaggggagaaggtgacaatgacctgtagcgcgagctccagcgtgacctccatgcattggttccaacaaaagagcggaacgagtcccaagcgctggatctacgatacctccaaattagctagcggggtcccagccaggtttagcggtagcgggagcggcacctcatacagtctcaccatctctatcatggaggcggaggatgctgcaacatactactgtcagcagtggaactacaaccctcccatgggtacattcggcggcggaacgaagctcgagatcaaacgggccgatgccgcgcctaccgtgagcattttcccaccaagctcagagcaactaacctctggcggcgcatcggtagtgtgtttccttaacaatttctatccgaaggatattaatgtgaaatggaaaatagatggttctgagcgtcaaaatggagtcttgaacagctggactgatcaggactcaaaggattctacttattccatgtcttctacgctcactctaacgaaagatgaatatgagaggcacaatagctacacctgcgaagccacccacaagactagtacaagccccatcgtcaaatcctttaataggaatgagtgt

SEQ ID NO: 15179 - DNA, 711 bp, synthetic construct
  misc_feature 1..711: note = source = /note="Description of Artificial Sequence: Synthetic coding sequence"
  source 1..711: mol_type = other DNA
atggactttcaagtgcagatatttagcttcttgctgataagcgccagcgtgattattagcagaggccagatcgtgcttacacagtctcctgccattatgtctgcatcccccggggagaaagtgaccatgacctgttctgcaagctccagcgtgacgtccatgcattggttccagcaaaaatctggcacttcccctaagaggtggatctatgacacctcaaagctggctagtggggtcccggctcggttctccggtagcggctccgggacctcttactccctcaccatcagcatcatggaagccgaggacgccgctacctattattgtcagcagtggaattacaatccccccatggggacgttcggcgggggaacaaagttggaaatcaagcgcgccgacgcagcaccaactgtgagcatttttccaccttcttccgaacagctgacctcaggtggtgcatccgtggtgtgctttctcaacaacttctatccaaaagatattaatgtgaagtggaagatagatggatctgagagacaaaacggggtgcttaacagctggaccgaccaggactccaaagacagcacctatagcatgtcatccaccttgaccctgaccaaagatgagtacgagcggcacaacagttatacctgcgaagcgacacacaaaacaagcacaagcccaatcgtgaaaagcttcaatcggaacgaatgc

SEQ ID NO: 15180 - DNA, 711 bp, synthetic construct
  misc_feature 1..711: note = source = /note="Description of Artificial Sequence: Synthetic coding sequence"
  source 1..711: mol_type = other DNA
atggacttccaggtgcaaatcttttcattcctcttaatttccgctagcgtgatcatttctagaggccagattgttttgacgcagtcaccggcgatcatgtctgcctctcctggggaaaaagttaccatgacatgttctgccagttcctccgtgacttccatgcactggtttcagcaaaaatctgggacgtcacctaaacggtggatctacgatacgtctaaactcgccagcggggtgcctgcaagattttcgggctctggtagtggaacaagctatagcctcacgatatcgataatggaagccgaagacgccgccacctattactgccagcagtggaactataacccacctatgggaaccttcggaggcggaaccaagctggaaataaaacgggctgatgccgcgcctacagtttcaattttccccccatcctctgagcaactcacctctgggggcgcctctgtagtttgctttttaaataatttttatcctaaagacatcaacgtcaaatggaagatcgacgggtcagagcgtcaaaacggtgtgttgaatagctggaccgaccaggactccaaggacagtacttacagcatgagcagtactcttaccttaacgaaggacgaatacgagaggcataactcatacacctgtgaagccacccataagacttctactagtcctattgtgaaaagcttcaaccgaaacgaatgt

SEQ ID NO: 15181 - DNA, 711 bp, synthetic construct
  misc_feature 1..711: note = source = /note="Description of Artificial Sequence: Synthetic coding sequence"
  source 1..711: mol_type = other DNA
atggattttcaagtccagatcttctcctttcttctgatttcagcatccgtaatcatctcaagaggccaaattgtgctgacccagagccccgcaatcatgagcgcgtcgcctggtgaaaaggtgacgatgacctgctccgcaagctcatcagtgacttccatgcactggtttcaacaaaagtccggaacttcccctaagcgatggatttatgatacctccaagctggcttcgggagtgcctgctcgtttctcgggatcaggatcaggtacctcgtactcactcactatttcgatcatggaagccgaggacgcagcgacgtactactgccaacagtggaactataacccacctatgggcacctttggaggaggaactaagctcgaaatcaaacgggcagatgccgcacccactgtgtccattttccctccatcaagcgaacaacttacctcgggaggagcctccgtggtttgtttcctgaataacttttacccgaaggacattaacgtgaagtggaagattgatggaagcgagagacagaacggagtgcttaactcatggactgatcaagactcgaaagactcaacttactcgatgtcgagcaccctcaccctgaccaaggacgaatacgagaggcataattcctacacctgtgaggctactcacaaaacttccacttccccaattgtcaagtcgttcaataggaacgagtgt

SEQ ID NO: 15182 - DNA, 711 bp, synthetic construct
  misc_feature 1..711: note = source = /note="Description of Artificial Sequence: Synthetic coding sequence"
  source 1..711: mol_type = other DNA
atggattttcaggtccagatattcagtttcttgctcatttccgccagcgtgatcatctcgcgcggccagatcgtcctgacacagagtcccgccatcatgtccgcttctccaggggagaaggtgaccatgacatgtagtgcaagttctagcgtgaccagcatgcattggtttcagcagaaatccggtacctctccaaagaggtggatctacgacaccagcaaactagccagcggagtccctgctcggttctcgggaagcggaagcggaaccagctatagcctaaccatctcgattatggaggccgaagatgccgccacatattactgccagcagtggaactataacccacctatgggaacctttgggggcggcaccaagctcgagatcaagcgcgccgatgcagcacctaccgtgagtatttttcccccttctagcgagcagctgactagtggaggtgcatctgtggtgtgttttctaaacaatttctaccctaaagatatcaacgtcaagtggaagattgacggctctgagcgtcagaatggagtcctcaacagctggaccgaccaggatagtaaagattctacgtattctatgtcctctacgctgactctgaccaaggacgagtacgagcgacataacagctacacttgcgaggcgacccacaagaccagtactagcccaatcgtgaaatccttcaaccgaaacgaatgc

SEQ ID NO: 15183 - DNA, 711 bp, synthetic construct; identical to SEQ ID NO: 15155
  misc_feature 1..711: note = source = /note="Description of Artificial Sequence: Synthetic coding sequence"
  source 1..711: mol_type = other DNA

SEQ ID NO: 15184 - DNA, 711 bp, synthetic construct
  misc_feature 1..711: note = source = /note="Description of Artificial Sequence: Synthetic coding sequence"
  source 1..711: mol_type = other DNA
atggatttccaggtacagatcttcagtttccttttgatctcggcatctgtcattatatctagaggtcagattgtcctcactcagagcccagcaattatgtccgcatccccaggtgagaaagttacgatgacatgttccgcatcatcctctgtgacatctatgcactggtttcagcagaaatcaggcaccagcccaaagcggtggatctatgatactagtaagctcgccagcggggtccccgccagattctctggctccgggagtgggacatcctactctctcaccatcagtatcatggaggctgaagatgctgcaacctactattgccagcagtggaattacaatccccccatgggcacgttcggagggggaacaaagttagagatcaagcgagcagacgcggcccccacggtgagtatctttccaccaagttccgaacagttgacctctggtggtgcatccgtcgtgtgctttctaaacaacttttacccgaaagatataaacgttaagtggaagatcgatgggtcagaaagacagaacggcgtgctaaattcatggactgaccaagacagtaaagattctacatactccatgagcagcaccctcaccctgactaaagacgagtacgaacggcataatagttacacctgtgaagccacccataagacttctaccagtccgatcgtgaagtccttcaaccgcaacgaatgt

SEQ ID NO: 15185 - DNA, 711 bp, synthetic construct
  misc_feature 1..711: note = source = /note="Description of Artificial Sequence: Synthetic coding sequence"
  source 1..711: mol_type = other DNA
atggactttcaggtgcagatcttttctttcctgctcatctcggcttctgtgatcatctccagggggcagatcgtgttgacccagtccccagccatcatgtcagcttcgcccggtgaaaaggtgaccatgacttgttccgctagctcatcggtgacttccatgcattggttccagcagaagtccggaacgtccccgaagcggtggatctacgacactagcaagctcgcatcgggcgtcccggcgcgcttttccggatccgggagcggcacgtcttactccctgactatctcaattatggaggcggaggacgccgcaacctactactgccaacagtggaattacaacccacctatgggtaccttcggaggaggcaccaagctggaaatcaagcgggccgatgcggccccgaccgtgagcatcttcccaccctcctcagaacagctgacttccggaggagcgagcgtggtgtgtttcctgaacaatttctacccgaaagatatcaacgtcaagtggaaaatcgacgggtctgaacggcagaatggggtcctgaattcgtggaccgatcaggactccaaggactcaacctactctatgagctccaccctgactctgacgaaggatgagtacgaaagacacaactcctacacctgcgaggcaacccataaaacttcgacttcgccgatcgtcaaatcctttaatcggaatgagtgc

SEQ ID NO: 15186 - DNA, 711 bp, synthetic construct
  misc_feature 1..711: note = source = /note="Description of Artificial Sequence: Synthetic coding sequence"
  source 1..711: mol_type = other DNA
atggactttcaggtgcagatcttctctttcctcttgatctcggcctccgtgatcatctcacgcggtcagatcgtgcttactcaatccccagctatcatgtctgcctccccgggtgaaaaagtcaccatgacttgctcagcgagctcgtctgtgacctcaatgcactggttccaacagaagtcaggcacctcaccgaagagatggatctacgacacttcgaagctggcatcaggagtcccggcacggttcagcgggtctggatcgggaacgtcgtattcgcttaccatctcgattatggaagccgaggatgctgcaacttactactgtcaacaatggaactacaatccgcctatgggcaccttcggcggcggaactaagctggaaatcaagcgtgcggatgccgcccctaccgtgagcatctttcccccctcttcagaacagctcaccagcgggggagcctcggttgtgtgcttcctcaacaacttttacccaaaggatatcaatgtaaagtggaagattgatggatctgaacggcagaatggagtcctgaatagctggaccgaccaggattccaaggactcaacttactcgatgtcgtctaccctgaccctgacgaaagacgagtacgagagacataacagctacacttgcgaagctacccacaaaactagcacttcaccaatcgtcaaatccttcaaccggaacgagtgt

SEQ ID NO: 15187 - DNA, 711 bp, synthetic construct
  misc_feature 1..711: note = source = /note="Description of Artificial Sequence: Synthetic coding sequence"
  source 1..711: mol_type = other DNA
atggattttcaagtccagattttctcgttccttctcatttcagcatcggtgattatcagcagaggacaaatagtgctgactcaaagtcctgccatcatgtcggcttcgcctggcgaaaaggtcaccatgacctgttctgccagctcgtcagtcacctccatgcactggtttcagcagaagtccggtacctcgccaaaaaggtggatttacgacaccagcaaactggcctcgggagttccagcacggttctcagggagcggctcaggcacttcatatagcctgaccatctctataatggaggccgaggacgcagccacctactactgccaacaatggaactacaacccacccatgggtaccttcggtgggggtaccaagttggaaatcaagagggcagatgccgcacctaccgtgtcaatctttcccccttcgtcagaacaactcacttccggaggagccagcgtcgtgtgttttctgaacaatttctaccctaaggacatcaatgtgaagtggaaaattgatggttcggaacggcaaaatggcgtgcttaactcttggacggaccaggattcgaaggattcaacttattccatgtcgtcaaccttgaccctcacgaaagatgaatacgaaagacacaacagctacacctgtgaagcaactcataagacctcgacttcgcctattgtcaagtcattcaacagaaacgagtgc

SEQ ID NO: 15188 - DNA, 711 bp, synthetic construct
  misc_feature 1..711: note = source = /note="Description of Artificial Sequence: Synthetic coding sequence"
  source 1..711: mol_type = other DNA
atggattttcaagttcaaatcttcagctttcttctgatcagcgcatccgtgatcatatccagaggtcaaattgtgcttacccaatcccccgcgatcatgtcggcctcgccaggtgaaaaagtgacgatgacctgttcagcctccagctcggtcacctcgatgcattggtttcaacaaaagtcgggcacctcccctaaaagatggatttacgatactagcaagctggcatccggagtcccagcaaggttctccggatccgggtctggaacctcatactcgctcacgatcagcatcatggaagcggaggatgcagctacctactactgccagcaatggaactacaatccaccgatgggtacttttggtggaggcacgaaacttgagattaagcgtgcagacgcagctcctaccgtttccatcttccccccttcaagtgagcaacttactagcggtggcgcatccgtggtgtgtttcctgaacaacttttatccgaaagacattaacgtgaaatggaaaatcgacgggtcggagcgccagaatggagtgctgaactcgtggaccgatcaggattccaaggacagcacctactcgatgtcgtccactcttacgctgaccaaggatgagtacgaaagacataattcgtacacctgtgaggcaacccataaaacctcaacctcgcctatcgtgaagtccttcaatcgcaacgagtgt

SEQ ID NO: 15189 - DNA, 711 bp, synthetic construct
  misc_feature 1..711: note = source = /note="Description of Artificial Sequence: Synthetic coding sequence"
  source 1..711: mol_type = other DNA
atggacttccaagtgcagattttctcatttctccttatatcggcgtcggtcatcatctcacggggacagattgtgcttactcaaagccctgcgattatgagcgcatcccctggtgagaaggtgaccatgacgtgttcggcatccagctccgtcacttcaatgcactggttccagcaaaagtcggggacctcaccgaagaggtggatatatgatacgagcaagctggcatcaggagtgccggcaagattttctggctccggatctggaacctcttactccctgacgattagcattatggaagccgaagatgccgctacctactactgccaacaatggaactacaacccccctatgggaaccttcggaggaggcactaaacttgagatcaagagagcagacgccgcccctactgtctcgatttttcccccttcctctgaacagctgacctcgggaggagcatcggtcgtgtgttttctgaacaacttttacccaaaggacataaacgtcaaatggaaaatcgatgggtccgagcggcaaaatggcgtgcttaatagctggaccgatcaggactccaaagattcaacctactcaatgtcgtcgacccttaccctgaccaaagacgaatacgaacgccataattcctatacgtgcgaggcaactcataagactagcacctcacctattgtgaaatccttcaacagaaacgaatgt

SEQ ID NO: 15190 - DNA, 711 bp, synthetic construct
  misc_feature 1..711: note = source = /note="Description of Artificial Sequence: Synthetic coding sequence"
  source 1..711: mol_type = other DNA
atggatttccaggtgcagattttctcctttctgcttataagcgcatcagtcattatcagccgcggtcagattgtgctgacccagagtccagcaattatgtctgcctccccgggagagaaggtgacgatgacgtgttctgccagttctagcgtgacttctatgcattggtttcaacagaaatcgggaaccagcccaaagcgatggatttatgacacgagtaagcttgcctctggggtccctgcaagattttccgggagcggatccggtacttcatatagtttgactatttctataatggaggccgaggacgccgctacctactattgccagcagtggaactacaaccccccgatgggtacattcggcggaggcactaaacttgagataaagagagcagatgcagcccccacagtgagcatctttcccccctcctccgagcagctaacctccgggggcgcctctgtggtgtgtttcctgaataatttttaccccaaggatatcaacgtgaagtggaaaatcgatggctccgaacgccagaatggagtgctgaacagttggactgaccaggattcaaaggactcaacctattcaatgagcagcacgctgactcttacaaaggatgaatacgagcggcacaattcttatacctgtgaggctacgcacaagacctccactagtcctatcgtgaagtcctttaaccgcaacgagtgt

SEQ ID NO: 15191 - DNA, 711 bp, synthetic construct
  misc_feature 1..711: note = source = /note="Description of Artificial Sequence: Synthetic coding sequence"
  source 1..711: mol_type = other DNA
atggacttccaggtgcagatcttttcttttttgctgatcagcgccagtgtgatcattagccgcggccaaatcgtgctgacccaaagcccagcaatcatgagcgcgtcacccggagaaaaggtgactatgacgtgctcggcatcatcgtcagtgacttccatgcactggtttcagcagaaaagcggaacctcgccaaagcgctggatttacgacacctcaaagctggcctcgggagtgcctgcccgcttcagcggctccgggtccggcacttcctactctttgactatctccatcatggaagcagaggacgccgcaacctactattgccagcagtggaactacaaccctccaatgggcaccttcggcggcggaactaagctcgaaatcaagcgagcggacgccgccccgactgtgagcatcttcccgccgtcgtccgaacaattgactagcggtggagcaagcgtcgtgtgcttcctgaacaatttctacccgaaagatatcaacgtcaagtggaagattgatgggtcagaaaggcaaaacggagttcttaattcgtggacggatcaggatagcaaagactccacttactcaatgagctcgaccctgactctcacgaaagacgaatacgaacgccacaatagctacacctgcgaggctacccacaaaacctccactagcccaatcgttaagtcgttcaaccggaacgagtgc

SEQ ID NO: 15192 - DNA, 711 bp, synthetic construct
  misc_feature 1..711: note = source = /note="Description of Artificial Sequence: Synthetic coding sequence"
  source 1..711: mol_type = other DNA
atggatttccaagttcaaatcttttcgttcttgctgatctccgcctccgtgatcattagccggggccagatcgtgctgacccagagcccagcaatcatgtcggcatcaccgggagagaaagtgaccatgacctgctcggcatcatcctcagtgacctcaatgcactggttccagcaaaaatctggtacctcgcccaaacgctggatctacgacaccagcaaactggcgtccggagtgccggcacggttctcgggcagcggctcgggcacctcctactcactgacgatctcaatcatggaagctgaggatgccgcaacttactactgccagcagtggaactacaacccaccgatgggaactttcggtggcggaactaagctggagattaagcgagctgatgccgcaccgaccgtgtcgatcttccccccgtcctccgaacagctcacttcaggaggggcctcagtggtctgtttcctgaacaacttttaccccaaggacattaatgtgaaatggaagatagacggatcggagaggcaaaatggggtgctgaattcgtggactgaccaggactcaaaggattcgacttactcgatgtcctcgaccctcactctgaccaaggacgagtatgaaagacacaattcctacacctgcgaagctacgcataaaacctccacctcgcctatcgtgaaatccttcaaccggaacgagtgc

SEQ ID NO: 15193 - DNA, 711 bp, synthetic construct
  misc_feature 1..711: note = source = /note="Description of Artificial Sequence: Synthetic coding sequence"
  source 1..711: mol_type = other DNA
atggattttcaagtacaaatattttcgtttctattaatatcggcgtcggtaataatatcgcgtggtcaaatagttttaacgcaatcgccggcgataatgtcggcgtcgccgggtgaaaaagtaacgatgacgtgttcggcgtcgtcgtcggtaacgtcgatgcattggtttcaacaaaaatcgggtacgtcgccgaaacgttggatatatgatacgtcgaaattagcgtcgggtgtaccggcgcgattttcgggttcgggttcgggtacgtcgtattcgttaacgatatcgataatggaagcggaagatgcggcgacgtattattgtcaacaatggaattataatccgccgatgggtacgtttggtggtggtacgaaattagaaataaaacgtgcggatgcggcgccgacggtttcgatatttccgccgtcgtcggaacaactaacgtcgggtggtgcgtcggtagtatgttttctaaataatttttatccgaaagatataaatgtaaaatggaaaatagatggttcggaacgacaaaatggtgtactaaattcgtggacggatcaagattcgaaagattcgacgtattcgatgtcgtcgacgttaacgctaacgaaagatgaatatgaacgtcataattcgtatacgtgtgaagcgacgcataaaacgtcgacgtcgccgatagtaaaatcgtttaatcgaaatgaatgt

SEQ ID NO: 15194 - DNA, 711 bp, synthetic construct
  misc_feature 1..711: note = source = /note="Description of Artificial Sequence: Synthetic coding sequence"
  source 1..711: mol_type = other DNA
atggattttcaagtccagattttctcgttcctgctcatttcagcgtcagtcatcattagccggggacaaatagtgctgacccagtcgcccgcgatcatgtctgcaagcccgggggaaaaagtgactatgacctgtagcgcctcgtcctcagtcacttcgatgcactggtttcagcaaaagtccggcacttcacctaagcgatggatatatgacacttcgaaattggcatcgggtgtgcctgcccgtttcagcggttcaggatcgggcacttcctactccctgaccatctccatcatggaagctgaagatgctgccacctactactgccagcagtggaactacaacccgccaatgggaacgttcggagggggaaccaagttggaaatcaagagagcggacgcggcacctactgtgagcatttttccccctagctccgagcaactgacgtcaggaggggcaagcgtggtctgttttcttaacaacttttaccctaaagacatcaacgttaagtggaagattgatgggtcggagagacaaaatggagtgctgaacagctggacggaccaagattctaaagattcaacctactcgatgtcctctactcttacccttaccaaggatgaatacgagcgccataattcttacacgtgtgaagctactcataaaacgtccacttcacctatagtcaagagctttaatcgtaacgagtgc

SEQ ID NO: 15195 - DNA, 711 bp, synthetic construct
  misc_feature 1..711: note = source = /note="Description of Artificial Sequence: Synthetic coding sequence"
  source 1..711: mol_type = other DNA
atggacttccaggtgcagatcttctcgtttctgctgatctccgcctccgttatcatttcccggggtcaaattgtccttacgcagtcacctgcaatcatgtctgcctcaccaggcgagaaagtgaccatgacttgctcagcgtcctcgagcgtcacttcaatgcactggttccagcagaagtcaggcacctctccgaagcggtggatctacgatacctcgaaactggccagcggagtgccagccagattctcgggatcgggtagcgggacctcctactccctgactatctccatcatggaggccgaagatgcagccacctactactgccaacagtggaattacaatccgccaatggggactttcggtggtggaactaaactcgagatcaaaagagccgatgcagcacccactgtgtcgatcttccctccgagcagcgaacagctcaccagcggcggagcttcggtggtgtgcttcctgaataacttctatccgaaagacatcaacgtgaagtggaaaatcgatgggtccgagaggcaaaacggtgtgttgaactcgtggacggaccaggacagcaaggattcgacgtactcgatgtcaagcaccctcactctgaccaaggatgaatacgagagacataactcctacacttgtgaggccacccacaagaccagcaccagcccgatcgtgaagagctttaaccggaatgagtgc

SEQ ID NO: 15196 - DNA, 711 bp, synthetic construct
  misc_feature 1..711: note = source = /note="Description of Artificial Sequence: Synthetic coding sequence"
  source 1..711: mol_type = other DNA
atggatttccaagttcagatattctcctttcttctgatcagcgcctctgttattatcagccgcggtcagatcgttctcacacaaagcccggccatcatgagcgcctcaccaggcgaaaaggtgacaatgacctgttccgcctcaagtagcgtgaccagtatgcattggtttcaacagaagagcggtacgtcgccaaagcggtggatttacgatactagcaagttggcctccggggtgcccgcgcggttttctggaagcggatcaggtacaagctattcattgactatttctattatggaggccgaggatgcggctacctattattgtcagcagtggaactataacccgcccatgggcacatttggaggcggtaccaagctggagatcaagcgcgccgacgccgcgcctactgtcagtatcttccccccaagttccgaacagttaacctctggcggggcaagtgtggtgtgctttttgaataatttctacccgaaagacatcaacgttaaatggaagattgatgggagcgagagacagaacggcgtactaaattcctggaccgatcaggatagtaaggactccacctatagcatgagctctaccctgacactgactaaggacgagtatgagcgtcataattcttatacttgtgaagccacccacaagacctctacatctccaattgttaagtcatttaaccggaacgaatgc

SEQ ID NO: 15197 - DNA, 711 bp, synthetic construct
  misc_feature 1..711: note = source = /note="Description of Artificial Sequence: Synthetic coding sequence"
  source 1..711: mol_type = other DNA
atggatttccaagtgcaaatcttctcctttctcctcatttccgcgagcgtcataatctcgcgcggacagatcgtgcttacccaatcccctgcgatcatgtcggcatctcccggtgagaaagtgaccatgacttgctcggcctccagctcagtgaccagcatgcattggttccagcagaagtcaggcacttcaccaaagaggtggatttacgatacttcgaagctggcctcgggtgtcccagctcgcttctcgggctcgggcagcggaactagctacagcctgactatatcaataatggaagcagaggacgcagcaacctactattgtcagcagtggaactataaccccccaatggggacgtttggcggagggacgaagctggagatcaagagagcagatgcagctccaactgtcagcattttccccccttcgtcggagcagttgaccagcgggggagcctcagtggtgtgttttttgaataacttttaccccaaggacattaacgttaagtggaagattgacgggagtgagcggcaaaacggtgtgctgaattcatggaccgatcaagactcaaaggattccacctactccatgtcctcaactcttaccctcactaaggatgagtacgagaggcataacagctacacctgcgaagccacccacaaaacttcaacctcgcctatagttaagtcgtttaaccgaaatgagtgt

SEQ ID NO: 15198 - DNA, 711 bp, synthetic construct
  misc_feature 1..711: note = source = /note="Description of Artificial Sequence: Synthetic coding sequence"
  source 1..711: mol_type = other DNA
atggattttcaggtacaaatcttctcttttctcctaatcagcgcaagtgtcattatcagccgaggccagattgtgctgacccagtctcctgctatcatgtccgcttcccctggtgaaaaggtaaccatgacatgttccgcgtcctcatccgttaccagcatgcattggttccagcaaaagtcagggacatcacctaaacgctggatttacgacacaagcaagttggcttcgggagtgcctgctcgattttctggctctggctccgggacctcttatagcctgactatttcaattatggaggcagaggacgcagctacctattactgtcaacagtggaattacaatcctcctatgggtacatttggtggcggaacaaaactagagatcaaacgggccgatgctgcacccaccgtcagtatattccctccctcttccgagcaactgacatctgggggcgccagtgtcgtttgttttctgaataatttctatcctaaggacatcaatgttaagtggaagatcgatggctctgaacggcagaacggcgtactcaatagttggactgaccaggacagtaaggactccacctacagcatgagctccacactgacactaacgaaggacgagtacgaacgacacaattcctacacttgtgaggccacacataaaacatccacgagtccaattgttaaaagttttaacaggaacgaatgc

SEQ ID NO: 15199 - DNA, 711 bp, synthetic construct
  misc_feature 1..711: note = source = /note="Description of Artificial Sequence: Synthetic coding sequence"
  source 1..711: mol_type = other DNA
atggacttccaagtgcagatcttcagctttctgctcattagcgccagtgtgatcatttcgcggggccagatcgtgctcacccagtccccagcaatcatgagcgcaagcccgggagaaaaggtgactatgacttgcagcgcttcgtcgtcggttacgtccatgcattggttccagcaaaagtccggcacttcgcccaagcgatggatctacgacacgtccaaactggcgtcgggagtgcccgccaggttcagcggctcgggctctggtacctcctactcgctgaccatttcgatcatggaggccgaagatgcagccacttattactgccaacagtggaactacaacccgccaatgggtaccttcggaggtggaactaagctcgaaatcaagcgggcagacgccgcgcccactgtgtcgatctttccgccgtccagcgagcagctgacttccggaggggcctccgtggtgtgctttctcaacaatttctacccgaaagacattaacgtgaaatggaagatcgacggctcggaacggcagaatggggtgttgaattcgtggaccgatcaggactcgaaagacagcacctactcaatgtccagcacccttacgctgactaaggatgaatacgagagacataattcctatacttgcgaggcgactcataagacttcaacttcccccatcgtcaagtcgttcaaccgcaacgaatgc

SEQ ID NO: 15200 - DNA, 711 bp, synthetic construct
  misc_feature 1..711: note = source = /note="Description of Artificial Sequence: Synthetic coding sequence"
  source 1..711: mol_type = other DNA
atggatttccaagtgcagatattcagctttctgctgatcagcgcaagcgtgatcatttcgcgcggtcagattgttctcacccagtcccctgcgatcatgtccgcctcgcctggagaaaaagtcactatgacttgttccgcatcgtcatcggtgacctccatgcattggtttcagcagaaatcaggtactagccctaagaggtggatttacgatactagcaagctcgcctccggcgttcccgcgagattctcgggatcaggtagcggcacctcttactctttgacgatctcgattatggaggcagaagatgccgcgacgtactactgtcaacagtggaattacaacccgcctatggggactttcggaggtgggaccaaactggagattaaacgagcagatgcggcacccaccgtgagcattttccctccgtcatcagaacaactgacctcggggggtgcttccgtcgtgtgttttctgaacaacttttacccgaaggacattaacgtcaagtggaagatcgacgggtcagagagacagaacggtgtcctgaactcctggaccgatcaagatagcaaggatagcacttacagcatgtcgagcaccctgaccctgactaaggatgagtacgaacgccacaattcctacacctgtgaagcaactcataagacttccacctcccctatagtgaaatcgttcaatagaaatgagtgc

SEQ ID NO: 15201 - DNA, 711 bp, synthetic construct
  misc_feature 1..711: note = source = /note="Description of Artificial Sequence: Synthetic coding sequence"
  source 1..711: mol_type = other DNA
atggacttccaggtccagatcttttcgttcctgctcatctcggcaagcgtgattatcagccgcggccagatcgtcctgacccagagcccggccattatgtcagcctcgccgggggaaaaggtgactatgacttgcagcgcgagctcaagcgtgacttccatgcattggttccagcaaaaatcgggcacgtcacccaagagatggatctacgataccagcaagctcgcctcgggagtgcctgccagattctcaggatctggatcgggcacttcctacagcctgaccattagcatcatggaagcagaagatgctgctacttactactgtcaacaatggaactacaacccgccaatgggaacttttgggggaggcacgaagctcgaaatcaagcgcgccgatgccgctcctactgtgtccatcttccccccgtcgtcagagcaactgaccagcgggggcgcctctgtggtgtgtttcctgaacaatttctacccgaaggacattaatgtgaagtggaagatcgacgggtctgaaagacagaacggagtcctgaattcatggaccgaccaggactccaaagactcaacctactcaatgtcctccactctgaccttgaccaaggacgaatacgagcggcacaacagctacacttgcgaagcaactcataagacttccacctcgcctatcgtgaagtcgttcaaccggaacgagtgc

SEQ ID NO: 15202 - DNA, 711 bp, synthetic construct
  misc_feature 1..711: note = source = /note="Description of Artificial Sequence: Synthetic coding sequence"
  source 1..711: mol_type = other DNA
atggattttcaggtgcaaatttttagttttttactcatttccgccagtgtgattatttctcggggacagattgtactgactcaatctccggccatcatgtcggcctccccaggagaaaaggttacgatgacctgttcggcgtcaagtagcgtgacatctatgcactggtttcagcagaaatctggtacaagccctaaacgatggatttatgatacctccaaactggcctcaggcgtcccggctcgcttttcagggagtgggtctggcacctcatacagtcttaccatctcaataatggaggccgaggacgccgctacatattactgccagcagtggaattataatccaccgatgggcaccttcggggggggtactaaactggaaatcaagagagccgacgctgcccccaccgttagcatatttccgccaagtagtgagcagctgacctctggaggtgccagtgtggtgtgctttcttaacaatttctacccaaaggacattaatgttaagtggaaaatagatggttctgagagacagaacggagttctgaattcttggacagatcaggattctaaagatagcacatactccatgtctagtactctgacactcaccaaggatgaatatgaacgacacaactcatacacctgtgaggcaacccacaagaccagcacctccccgatcgtcaagtccttcaacagaaacgaatgc

SEQ ID NO: 15203 - DNA, 711 bp, synthetic construct
  misc_feature 1..711: note = source = /note="Description of Artificial Sequence: Synthetic coding sequence"
  source 1..711: mol_type = other DNA
atggattttcaggttcaaatcttcagctttctgctgatctccgcatccgtcatcattagcagaggccagatcgtgctcactcagtcaccggctattatgtcagcttcaccgggtgaaaaggtcactatgacctgcagcgcgtcatcgtcggtgacctcgatgcattggttccagcaaaagtccggaactagccccaagcggtggatctacgatactagcaagctggcttctggagtgccggcacgcttttctgggtcgggatccggaacgagctactcgctgactatctcaatcatggaagctgaggatgcagccacctactactgccaacaatggaattacaaccctccaatgggcactttcggtggagggaccaagctcgaaatcaagcgtgccgacgcggcccctaccgtgagcatcttcccaccgtcgtcagagcaattgaccagcggaggagcctccgtggtttgcttcctcaacaacttctaccctaaggatatcaacgtcaaatggaagattgacggctcagagcggcagaacggggtcctcaactcctggactgatcaggactcgaaagactcgacctacagcatgtcctcgacgctcactctgactaaggatgaatacgagcggcacaactcgtacacttgcgaggccactcataagacctcaacctcgccgatcgtgaagagctttaaccggaacgagtgt

SEQ ID NO: 15204 - DNA, 711 bp, synthetic construct
  misc_feature 1..711: note = source = /note="Description of Artificial Sequence: Synthetic coding sequence"
  source 1..711: mol_type = other DNA
atggatttccaggttcagatcttctcttttctcctgatctctgctagtgtaatcatctctcgagggcagatagtcctgacacagtctccagcgatcatgtcagcttctcctggagaaaaggtgaccatgacatgctctgctagcagctcagttacctccatgcactggtttcagcagaaatcaggcacaagccccaaacggtggatttacgacacgagtaagctggcttcaggggtcccagccagattcagcggctccgggtcgggcactagctatagcctgaccattagtataatggaggccgaggacgccgcaacatactattgccagcaatggaattataacccacccatgggtaccttcgggggcggtacgaagttggaaatcaaacgcgcagatgccgcacccacggttagcatctttccaccgagttcagaacagctgacctccggaggggcatccgttgtctgttttcttaacaacttctatccgaaggacatcaacgtgaagtggaaaattgatggaagcgaacgccagaacggcgtcttgaattcatggacagatcaggactccaaagacagcacctacagcatgtcaagtactctgacactgaccaaggatgagtatgaacgacacaactcatacacctgcgaggccacacacaaaacgagtacaagtccaatcgtgaagtcgttcaaccggaatgagtgc

SEQ ID NO: 15205 - DNA, 711 bp, synthetic construct
  misc_feature 1..711: note = source = /note="Description of Artificial Sequence: Synthetic coding sequence"
  source 1..711: mol_type = other DNA
atggattttcaagtgcagatcttcagctttctacttatttctgcttccgtgataatttcccgggggcagatagtgctgacccagagtccggctatcatgtcggcttcacctggggaaaaggtcacgatgacttgtagtgcctcgtcgtccgtgacttccatgcattggttccaacagaaatccggaacatcccccaagcggtggatatatgacacatccaagctcgcatctggagtacctgcccgattcagtggaagcggttctgggacctcttatagtctgacaatctccattatggaagcagaggatgccgctacgtattattgtcagcagtggaactacaacccccctatgggcacttttgggggtggaacaaaactcgaaatcaagagggctgatgcggcgcccacggtctctatcttcccccccagctccgagcagctgacctctggcggcgcaagcgtggtgtgctttctgaataacttttatcccaaggacatcaacgtgaagtggaagattgacggctcagaacgccagaatggggtgctgaactcctggaccgaccaagacagcaaggattctacatatagcatgtcgtcaacccttactttaaccaaggacgagtatgaacggcataactcttatacttgtgaagccactcataagacctcgacatcgccaattgtaaagagcttcaaccgaaacgagtgt

SEQ ID NO: 15206 - DNA, 711 bp, synthetic construct
  misc_feature 1..711: note = source = /note="Description of Artificial Sequence: Synthetic coding sequence"
  source 1..711: mol_type = other DNA
atggacttccaggtgcagatcttttcctttctgctgatctctgcctccgtcatcatttccagaggccaaattgtcctgactcaatcgcctgcaattatgtccgcatccccgggagaaaaggtcacgatgacttgttccgcctcctcgtcagttaccagcatgcactggtttcaacagaaatcgggcacttcccctaagcggtggatttacgacacctccaagctggcctcgggcgtgccagccagattttccggctcagggtcaggcacgagctacagcctgaccatatcaattatggaagccgaggatgcagcaacttactactgtcaacaatggaattacaatcctccaatgggtacctttggaggaggcaccaaactggaaatcaagagagcagacgcggcacctactgtgtccatttttcctccttcatccgaacagctcaccagcggaggagcgagcgtcgtgtgttttcttaacaacttttacccaaaagacataaacgtgaaatggaagatcgacggaagcgaacgccaaaacggtgtgcttaactcctggactgaccaagactcaaaagactcaacctattctatgtcgtcaactttgacccttaccaaggatgaatacgagagacataattcctacacgtgcgaggcaacccataagacttcgacgtcgcccattgtgaaatcgtttaacagaaacgaatgc

SEQ ID NO: 15207 - DNA, 711 bp, synthetic construct
  misc_feature 1..711: note = source = /note="Description of Artificial Sequence: Synthetic coding sequence"
  source 1..711: mol_type = other DNA
atggacttccaggtgcaaattttctctttcctgttgatttctgcctctgttatcatatctcgggggcagatcgtcctcacacagtctcctgcaataatgtctgcttctcctggtgaaaaggtgacaatgacttgctcagcctcttcctcagttacatcaatgcactggtttcagcaaaagtcgggtactagccctaaaaggtggatctacgacactagcaagcttgcctccggagtccctgctcgattttcaggtagcggatccggaacttcttactccctgacaattagtatcatggaagcggaagatgcagcaacatattattgccagcagtggaattataacccaccaatgggtaccttcggaggaggtacaaaactcgaaatcaagcgagctgatgccgccccaactgtctccattttccctccttcttctgagcagttgacctccggtggtgcttcagtggtttgcttcctcaataacttttatccaaaggatataaacgtcaaatggaaaatagacggatcagagcgtcaaaacggggtgttgaatagttggaccgatcaggattcaaaggatagtacatatagtatgtccagtacactcactttgacaaaagatgaatacgaaaggcataattcatatacttgcgaagcaactcacaaaacgtccaccagtcctatcgtcaagtcgttcaaccgtaacgagtgt

SEQ ID NO: 15208 - DNA, 711 bp, synthetic construct
  misc_feature 1..711: note = source = /note="Description of Artificial Sequence: Synthetic coding sequence"
  source 1..711: mol_type = other DNA
atggacttccaggtccagatcttctctttcctgctcatatctgcctctgtcattatctcgcgcggtcagatcgttctaactcagagcccagccataatgtctgcatctcccggggagaaggtgacaatgacatgctccgcaagctcatccgtgaccagcatgcactggttccagcagaaatcaggcacatcaccaaagagatggatctatgacaccagtaagctggccagtggggtgcctgctcggtttagcgggagcggatctggaacttcctattctctcacaatttctatcatggaggctgaggatgccgccacatactactgtcagcaatggaactacaaccctcccatgggcacattcggtgggggaactaaacttgagatcaaacgtgctgacgctgcccccactgtgtccatctttccacccagctctgaacagctgacatccggcggggccagcgtagtatgcttcctgaacaatttctacccaaaagatatcaacgttaagtggaagattgacggctccgagcgccagaatggggtgttaaacagctggactgatcaggacagtaaagatagcacttactctatgtcctcaacactaaccctaaccaaggacgagtacgagagacacaacagctacacgtgcgaggctacgcacaaaaccagtacatcccccatagtgaaaagttttaatagaaatgaatgc

SEQ ID NO: 15209 - DNA, 711 bp, synthetic construct
  misc_feature 1..711: note = source = /note="Description of Artificial Sequence: Synthetic coding sequence"
  source 1..711: mol_type = other DNA
atggacttccaggtccagatcttctcgtttctgcttatctcggcaagcgtgatcatctccagaggacaaattgtcttgactcagagcccggctatcatgtcggcctcaccgggcgagaaggttaccatgacctgttctgcaagttcgtccgtcacgtcgatgcactggttccagcagaagtccggaacttccccgaaaaggtggatctacgatacgtcgaaactggcctcaggtgtgccggctcgcttttcaggcagcggatcgggcactagttatagcctcaccatctccattatggaggctgaggatgccgccacctactactgccagcaatggaattacaacccacctatggggactttcggtgggggcactaagctcgaaatcaagagggccgatgctgcccctactgtgtcgatcttcccccctagctcggaacagctgacctcgggaggcgccagcgtcgtgtgcttcctcaacaacttttacccgaaggatatcaatgtgaagtggaaaatcgacggaagcgagcgacagaacggggtcctgaattcctggaccgaccaggattcaaaggactccacttacagcatgtcatccaccctgactctgactaaagatgaatatgaacgccacaattcgtacacttgtgaggccactcacaaaacctcgaccagccctatagtcaagtcgttcaaccgcaacgaatgc

SEQ ID NO: 15210 - DNA, 711 bp, synthetic construct
  misc_feature 1..711: note = source = /note="Description of Artificial Sequence: Synthetic coding sequence"
  source 1..711: mol_type = other DNA
atggattttcaggtccagatctttagctttctgttgatatccgcaagcgtgattatctcaagaggacagatcgtgctgactcaatcgcctgcaattatgagcgcaagccctggggagaaggtgaccatgacttgcagcgcaagctcgtcagttactagcatgcactggtttcaacagaagagcggaaccagccctaagagatggatctacgacacctccaagctcgcatcaggcgtgccagccaggttctcgggctccgggagcggaactagctactcgctcaccatctcaattatggaagcagaagatgcggccacttactactgccaacaatggaactacaacccgcctatgggaacttttgggggtggtaccaagctcgagattaagagagcggatgcagcacctacggtgtcgatttttccaccatcgtcagaacaactgacttcgggtggtgcgtcggtggtgtgttttctcaacaacttctaccccaaagacattaacgtcaagtggaagatagatgggagcgaacgccaaaacggcgtgcttaactcgtggactgaccaggattccaaggattccacttactccatgtcctcgaccttgaccctgaccaaagatgaatacgagaggcataacagctacacctgcgaagcaacgcacaaaacttcgacctcccccattgtgaagtccttcaatcgcaacgagtgt

SEQ ID NO: 15211 - DNA, 711 bp, synthetic construct
  misc_feature 1..711: note = source = /note="Description of Artificial Sequence: Synthetic coding sequence"
  source 1..711: mol_type = other DNA
atggatttccaagtacagatcttttcttttcttttgatttcagcctctgttattatttcacgaggacaaattgtcttgacacaatcaccggctatcatgtcggcgtcaccaggagagaaagtgaccatgacatgctctgcgtctagctctgttacttcaatgcactggttccaacaaaaatctggcacttcacccaaaaggtggatttacgatacctctaagcttgctagtggagtgccggctaggttcagcggatccggaagcgggacctcgtattcattgactatcagcattatggaagcagaggatgcggccacgtactactgtcaacaatggaattacaatcccccaatgggtaccttcggaggaggtacaaagcttgagatcaagagagctgatgctgcaccgactgtctcaatttttcctccatcatccgaacaacttacctccggaggagcgtccgttgtgtgctttttgaataatttctacccgaaagatataaacgttaaatggaaaattgacggatcggagcgacaaaacggagtgctcaactcatggacagatcaagattcgaaagactcaacttactcaatgtcgtcaactttgaccctcacaaaggatgaatacgagcgacacaattcttatacctgtgaggctacacataagacttctacttcaccaattgttaaaagtttcaatcgaaacgaatgt

SEQ ID NO: 15212 - DNA, 711 bp, synthetic construct
  misc_feature 1..711: note = source = /note="Description of Artificial Sequence: Synthetic coding sequence"
  source 1..711: mol_type = other DNA
atggacttccaggtgcagatcttttccttcctcctcatctccgcctcggtgatcatcagccgcggtcaaatcgtcctgactcagagcccggcaatcatgagcgcatccccaggagagaaagtgactatgacttgctcagcctccagctcagtgacctccatgcactggttccaacagaagtcaggtacctctccaaaacgctggatctacgacacctcgaaactcgcgagcggtgtgcctgcacgattttctggatcgggctcgggcacttcgtattcgctgactatcagcatcatggaggcagaggacgccgcgacctactactgtcagcaatggaactacaatcctccaatgggcaccttcggcggaggcaccaaactggaaatcaagcgggccgacgcggcaccgactgtctcgatcttccccccttcgagcgaacaactgacctcgggaggagccagcgtcgtctgctttcttaacaatttctatccgaaggatatcaatgtgaaatggaaaatcgacggttccgagcggcagaatggcgtgctcaattcatggactgatcaagactccaaggattcaacctacagcatgtccagcactctcacccttaccaaggacgaatacgagagacacaactcgtacacctgtgaagccactcataagacctcaacttcaccgatcgtgaagtcctttaatcgcaacgaatgc

SEQ ID NO: 15213 - DNA, 711 bp, synthetic construct
  misc_feature 1..711: note = source = /note="Description of Artificial Sequence: Synthetic coding sequence"
  source 1..711: mol_type = other DNA
atggattttcaggtgcagatcttttctttcctgctgatatcggcttcagtgattatctcccgaggtcaaatcgtgctcactcaatccccggctattatgtcagcctcaccaggagaaaaagtgaccatgacctgttcggcgtcgtcaagcgtgacgtcaatgcattggtttcagcagaagagcgggacttcccctaagagatggatttacgatacttccaagttggcaagcggtgtgccagcgcggttcagcggctcggggtccgggacctcgtactcgcttaccatttcgattatggaggcagaagatgcggcgacctactactgccagcaatggaattacaacccacctatgggaacgtttgggggaggtactaaactggaaatcaaaagggcagatgcagcacccaccgtgagcattttcccaccgtcatccgaacagctgaccagcggaggagcatcagtcgtgtgctttctcaacaacttttaccctaaagatatcaatgtcaagtggaagatcgacgggtcagaaaggcagaatggagtccttaattcgtggaccgatcaagactcaaaggactcgacttactcgatgtcatcgacccttaccctcaccaaggatgaatacgagagacataactcttacacttgtgaagcgacccataaaaccagcacttctccaatcgtcaagtcgttcaacagaaacgagtgc

SEQ ID NO: 15214 - DNA, 711 bp, synthetic construct
  misc_feature 1..711: note = source = /note="Description of Artificial Sequence: Synthetic coding sequence"
  source 1..711: mol_type = other DNA
atggacttccaagtccagatctttagctttctccttatctctgcctcagtcattatctcccgaggacagatagtgttaacacaatctccggccatcatgtctgcttcccctggcgaaaaagtaactatgacgtgcagtgcaagttcaagtgtcacttcaatgcattggttccagcaaaagagcggaacatctcctaagcggtggatctacgatacatcaaagctggcctctggtgtgcctgcacgtttctccggatccggttctggtaccagctactcactgaccatctccattatggaggctgaggacgcagccacctattattgtcaacagtggaattacaacccaccaatgggaacatttggtggtgggactaaactggaaataaaaagggcagatgctgccccaactgtctctattttcccaccctccagtgaacaactgacaagcggtggtgctagcgtggtatgtttcctgaataacttttacccaaaagacatcaatgtcaaatggaaaatcgacggctctgaaaggcaaaacggagtcctgaattcctggactgaccaggactctaaggacagtacctacagtatgtcttccacactcactttgacaaaagacgaatacgagaggcataactcatacacctgtgaagcgacccataagacaagcacgtcaccaatcgtaaagtctttcaacaggaacgaatgc

SEQ ID NO: 15215 - DNA, 711 bp, synthetic construct
  misc_feature 1..711: note = source = /note="Description of Artificial Sequence: Synthetic coding sequence"
  source 1..711: mol_type = other DNA
atggattttcaagtgcagatcttttccttcctgctgatttccgcctcagtgattatcagcagaggccagattgtgctgacccaatccccagcaataatgtccgcctcaccgggagaaaaggtcactatgacttgttcggcaagcagctcggtcacctccatgcattggttccaacaaaagtcgggcacttcccctaagcgctggatctacgacacttcaaaactcgcatccggagtgccagcgcgattctcgggatccggaagcggtacttcatactcgctcactatttcaatcatggaagcagaagatgcggcgacttattactgtcaacaatggaactacaatccaccaatgggaacttttggaggcggaacgaagctggaaatcaagagggcggacgccgcacctaccgtctccatttttcctccctcaagcgaacagctgacttccggtggcgcatccgtggtgtgctttcttaacaacttttaccctaaggacataaatgtcaagtggaagattgatggaagcgagagacaaaacggagttcttaatagctggactgatcaggatagcaaggattccacttactcgatgtcatcgactctgacgctcaccaaggacgaatacgaaaggcacaattcgtacacctgtgaggctacccataagacctcgacttcacctattgtgaagagctttaatcgaaacgagtgc

SEQ ID NO: 15216 - DNA, 711 bp, synthetic construct
  misc_feature 1..711: note = source = /note="Description of Artificial Sequence: Synthetic coding sequence"
  source 1..711: mol_type = other DNA
atggatttccaggttcagatattctcatttttgctgatctcagcatcagtcatcatttctaggggacaaatagtgcttactcaatcaccagcgatcatgtcagcctcccccggcgagaaagtcacgatgacgtgtagcgcttccagctctgtgactagcatgcactggtttcaacaaaagagcggcacctcgcctaaacggtggatttacgacactagcaagttggcctccggggtgcccgcgcggttttctggttcgggttcgggaacttcctactccctgactatttcgattatggaggcagaagatgcggccacctactactgtcagcagtggaattacaatccaccgatgggtacgtttgggggaggtaccaaacttgaaatcaagagggcagatgccgcaccaaccgtgagcatatttcctccatcctcggagcagcttacgtcggggggagcatccgtggtgtgcttccttaacaacttttacccaaaggacataaacgtcaaatggaagatcgacggatctgaaagacagaacggggtcctcaacagctggactgatcaagattcgaaagattcgacttactcgatgtcatcgactcttactctcaccaaagatgaatacgaacgccataactcctacacctgtgaagcaacccataaaactagcaccagccccatcgtgaagtcattcaacagaaacgagtgt

SEQ ID NO: 15217 - DNA, 711 bp, synthetic construct
  misc_feature 1..711: note = source = /note="Description of Artificial Sequence: Synthetic coding sequence"
  source 1..711: mol_type = other DNA
atggattttcaggtccagatattctcgttcctacttatatcggcttccgtaattatctctagagggcagatagtactgactcagtctccagcaataatgtcggcttccccaggggaaaaagtcactatgacatgttctgcttctagttctgtaacatcaatgcattggtttcagcagaaatctgggacttcacctaaacgctggatatatgatacatccaaactagcctccggggtccctgcgagattctcggggtccggatccggaactagttactcgctcactatttccatcatggaagcagaagatgctgccacatattactgccaacagtggaactataacccaccaatggggacgttcggggggggaactaaacttgaaataaaacgagctgatgctgcacctacagtatctatctttcccccaagttcagaacagctaacatcagggggagcttctgtggtgtgtttcctcaacaacttttatcccaaggatataaatgtaaagtggaaaatcgatggaagtgaacggcaaaatggagtcctcaactcttggactgatcaggacagtaaagattccacatattcgatgtcttcaacactgactctaacaaaagatgaatatgagaggcacaactcatatacatgtgaggctacacataaaacttctacaagtccaatcgttaaatcttttaataggaacgagtgc

SEQ ID NO: 15218 - DNA, 711 bp, synthetic construct
  misc_feature 1..711: note = source = /note="Description of Artificial Sequence: Synthetic coding sequence"
  source 1..711: mol_type = other DNA
atggcggtgatggcacctcgcacattggtacttttgcttagtggagccttggccttgacacaaacttgggccgacatacaaatgacacagagcccgtccaccctgtctgcctcagttggagacagagtgaccattacgtgtaaatgccagctcagtgtcggctatatgcattggtatcagcagaagccaggcaaggcaccgaagctgctcatctatgacacctcaaaactggcctctggagtgccatctcgctttagcggcagtggatcagggacggagtttaccctcaccatcagttctctgcagccagatgacttcgctacctactattgttttcaggggagcggttatcctttcacttttggtggaggaactaagctcgagattaaaagaacggtcgcagcgccatccgttttcatatttcccccgtccgatgagcaactgaaatctggcaccgccagcgtggtgtgtctcctgaacaatttctaccctcgtgaggcaaaagttcaatggaaggtagataatgcgttacagagcggcaattcgcaggaaagcgttacagagcaggactccaaagatagtacgtattctctgtcgtctactctgacgctgtcaaaggccgactacgaaaagcacaaagtctacgcttgtgaagttacacatcagggactgagttctccggttacgaagtcttttaatcgcggcgagtgt

SEQ ID NO: 15219 - DNA, 711 bp, synthetic construct
  misc_feature 1..711: note = source = /note="Description of Artificial Sequence: Synthetic coding sequence"
  source 1..711: mol_type = other DNA
atggcagtaatggcaccacgcaccctggtgcttttattgagtggagcgctcgccttaacccaaacttgggccgatatccaaatgactcagtcgccctcgacactatctgcgagtgttggcgaccgggtaaccattacgtgcaaatgccagctctccgtagggtacatgcactggtaccagcaaaaaccaggtaaggcccccaagctactgatctatgacaccagcaagctggcttctggcgtgccctccagattttcgggaagcggaagtggaactgaatttactctgacaattagtagcctacagcccgatgatttcgccacctattattgtttccagggcagcggctacccattcacctttggaggaggtactaaactagagataaagaggacagtcgccgcaccgtctgtctttatctttcccccatcagacgaacagctcaaatcaggtaccgcctccgttgtgtgcctgctgaacaatttctaccctcgagaggcgaaagtgcaatggaaagtggataacgccttgcaaagcggaaattcccaggaaagcgtgacagaacaggactctaaagattccacctatagtctctcatctacccttactttaagcaaagccgattacgaaaagcacaaggtttatgcctgcgaggtaactcaccagggtttatcttctcccgtcacgaaatcatttaatcggggcgaatgt

SEQ ID NO: 15220 - DNA, 711 bp, synthetic construct
  misc_feature 1..711: note = source = /note="Description of Artificial Sequence: Synthetic coding sequence"
  source 1..711: mol_type = other DNA
atggcagtcatggctccgcgcaccctggtgctcctgttgtccggggcactggcactgacgcagacttgggccgacatccaaatgacccaatcaccatcaaccctgagcgcgtccgtgggcgatcgcgtcactatcacttgtaagtgtcagctctcagtgggctacatgcactggtaccaacaaaaaccgggaaaggcgcccaagctgctcatctacgataccagcaagctcgcttcgggagtgccttcgcgcttctcgggaagcggtagcggaacggaattcaccttgactatctcgagtctgcagccggacgacttcgcgacctactattgctttcagggatccggatacccattcacgttcgggggaggtactaagttggaaatcaagagaaccgttgccgccccatccgtattcatcttcccgccatccgacgagcaactcaagagcggtactgcttcggtcgtctgcctgctgaacaatttctacccgcgcgaggctaaggtgcagtggaaagtggataacgctttgcagtctggaaactcacaggagagcgtcacggagcaggacagcaaggactccacgtactccctgtcctcgaccttgactctgtcgaaggctgattacgaaaaacacaaggtgtatgcatgcgaggtgacgcatcagggactctcgtcccccgtgactaagtcgttcaaccggggggaatgt

SEQ ID NO: 15221 - DNA, 711 bp, synthetic construct
  misc_feature 1..711: note = source = /note="Description of Artificial Sequence: Synthetic coding sequence"
  source 1..711: mol_type = other DNA
atggcagtgatggcgccccgcaccttggtcctgctcctgtcgggagcgctggcgctgacccagacttgggcagatattcaaatgacccaatcaccttcgactctttccgcgtcagtcggcgatcgagtgactataacctgtaagtgccaactgtcagtcggttatatgcattggtaccaacagaagcctggcaaggccccaaaactgctcatttacgacacctccaagctggcgtcgggagtcccatcgagattttcgggttccggatcaggaactgagttcacccttaccatttcctccctccagcctgacgatttcgcaacttactactgttttcaaggatcagggtacccttttacgtttggtggtggcaccaaacttgaaatcaagcggacggtggcggcaccctccgtgttcattttccctccttcagacgagcagctcaagtcaggtactgcctccgtggtctgtctgcttaacaatttctatcctcgggaggcaaaggtgcagtggaaagtggataacgcactgcagtccgggaacagccaagagtcagttaccgaacaagattcaaaggattccacctactcactgtcatctactcttaccctctcaaaggctgattacgaaaagcataaggtctacgcatgtgaagtcacccaccaaggactgagcagccctgtgactaagtcgttcaataggggtgaatgc

SEQ ID NO: 15222 - DNA, 711 bp, synthetic construct
  misc_feature 1..711: note = source = /note="Description of Artificial Sequence: Synthetic coding sequence"
  source 1..711: mol_type = other DNA
atggctgtgatggccccgagaacactggtcctcctgttgagcggtgctttggctcttactcagacctgggccgacatccagatgacacagagcccatccaccctctctgcaagcgtgggcgatcgcgtgaccatcacttgtaagtgtcagctcagcgtcggatatatgcactggtaccagcaaaagccaggcaaggcccccaagcttctgatctacgacaccagcaagctggcatcgggcgttccaagtcgcttttccggctcaggttctggcacagagtttaccctgactatatcctcgcttcagcccgatgacttcgccacttattattgctttcaaggttcaggttatccattcacctttggaggcggtacaaaacttgaaatcaagagaaccgtggcagcaccttccgtgttcatcttccctcctagtgatgagcagctaaaatctggaacagcaagcgtcgtctgtctgttgaataacttttatccccgggaggcaaaagtacagtggaaggtcgataacgccctgcagtctggaaactcccaggagtcggtgaccgagcaggacagcaaggattctacgtattctttgtcaagtaccctaactctttcaaaagccgattacgaaaaacataaagtatacgcttgtgaggtgacacaccaggggctatcttctcccgtgacaaaatcctttaatcgaggcgaatgc

SEQ ID NO: 15223 - DNA, 711 bp, synthetic construct
  misc_feature 1..711: note = source = /note="Description of Artificial Sequence: Synthetic coding sequence"
  source 1..711: mol_type = other DNA
atggcggtgatggccccaagaaccctggtccttctcctgtcaggcgccctggcccttacccaaacgtgggcagatattcaaatgactcagtccccttcgactctgagcgcctcggtgggtgatcgcgtcactatcacttgcaaatgtcagctgtcagtgggttacatgcactggtaccagcagaagcccgggaaagcgccaaagctgctgatatacgatacttcaaagttggcgtccggagtgccatcgcggttttcagggtcgggtagcggaactgaatttacccttacgataagctctctgcagcccgacgattttgcaacgtattactgcttccaaggatctgggtacccattcacctttggtggaggaactaagctcgagatcaagagaaccgtggccgctccatcggtgttcatcttccctccatcggacgaacaactgaagagcggcaccgcaagcgtcgtgtgtctcctcaacaacttttaccctcgggaggccaaggtgcaatggaaggtggataatgcccttcaatcgggaaattcccaagagtcggtcactgaacaggacagcaaggattcgacctacagcctcagcagcaccctgactctgtccaaggcggattacgagaagcataaggtgtacgcctgcgaagtcacccatcagggactttcctccccagtgaccaagagctttaatcggggcgaatgc

SEQ ID NO: 15224 - DNA, 711 bp, synthetic construct
  misc_feature 1..711: note = source = /note="Description of Artificial Sequence: Synthetic coding sequence"
  source 1..711: mol_type = other DNA
atggccgtgatggccccacgcactctagtcctactgctgtctggagccctagcgttgacgcagacatgggctgatatacagatgactcagagtccctccaccctcagtgcttcggtgggtgatcgtgtgacgataacgtgtaagtgccaactgtcggtgggctacatgcattggtatcagcaaaagcctggcaaagcccctaagcttctaatctacgatacctctaagctagcttcaggggtcccctctcgctttagtggcagtgggagcggtacggagtttacactgacaatcagctccctacagcccgatgattttgcgacctattactgtttccaggggagcggctaccctttcaccttcggtggtggtaccaaattggagatcaagaggacagtcgcagccccaagcgtgtttatctttccaccgagcgacgaacaactgaaatcaggcaccgcgtctgtggtttgcctccttaacaacttttatccgcgagaggctaaagttcagtggaaggtcgacaatgccctgcagtctggcaactcccaggaatccgtcacagagcaggactcaaaggacagtacatatagtctcagcagcacactcactttaagcaaggctgactacgaaaagcacaaagtgtatgcctgcgaagtgactcaccagggtttgtcttcccctgtgacaaagtcattcaatcgaggggagtgt

SEQ ID NO: 15225 - DNA, 711 bp, synthetic construct
  misc_feature 1..711: note = source = /note="Description of Artificial Sequence: Synthetic coding sequence"
  source 1..711: mol_type = other DNA
atggctgtgatggcacctcggactctggtgctgctcctctcgggagccctggctctgacccagacctgggcggatatccagatgacccaatccccgtcaactctgagcgcctctgtgggcgatagagttaccataacgtgcaagtgccagctctcggtgggatacatgcactggtaccagcagaaaccaggcaaggcaccaaagctcctcatctacgacaccagcaaactggcatcgggggtgccatcccggttctcagggtccggatcaggaacggaattcaccttgaccatctcctccctccagccggatgactttgccacgtactactgctttcaaggatcaggatacccatttactttcggaggtggcaccaagctcgagatcaaacgcaccgtggcagcaccgagcgtgttcatcttcccgccgtcagacgagcagctgaaatctggcactgcatcggtcgtctgcctcctgaacaacttttacccacgggaagcgaaagtgcagtggaaggtggacaacgctctgcagtcgggaaattcccaagaaagcgtgactgaacaggattcgaaggattccacctactcgctttcgtccacgctgacgctgtccaaggccgattatgaaaagcataaggtctacgcgtgcgaggtgacgcaccagggactgtcgtcgccggtgactaagtcgttcaacaggggtgaatgc

SEQ ID NO: 15226 - DNA, 711 bp, synthetic construct
  misc_feature 1..711: note = source = /note="Description of Artificial Sequence: Synthetic coding sequence"
  source 1..711: mol_type = other DNA
atggccgtgatggctccacgaactttggtcctcttgctctcaggggcgttggcactgacccaaacctgggcagatatccagatgactcagagcccaagcactttgtcagcaagcgtgggtgatagagtgaccataacctgcaagtgtcaactctcggttggatacatgcattggtaccagcagaagccgggtaaggcacccaaactgctcatttacgatactagcaagctcgcatcgggagtgccttcacgttttagcggttcggggagcggtaccgaattcaccctgactatttcatctcttcaacctgatgactttgcaacgtactactgctttcaaggttccggttaccccttcaccttcggaggtggtaccaagctggaaatcaaaagaactgtggccgcacctagtgtctttatctttcctccttcggacgagcagctgaagagcggcaccgccagcgtggtgtgccttctgaacaatttctatccacgggaagcaaaggtgcaatggaaggtcgataacgcccttcaaagcggcaatagccaggagtcagtgaccgagcaagattccaaggatagcacctactcgcttagcagcactctgactctctcgaaggcagattacgaaaaacacaaggtgtacgcatgtgaggtgacgcaccagggactcagctccccggtgactaaatcattcaaccgaggtgaatgt

SEQ ID NO: 15227 - DNA, 711 bp, synthetic construct
  misc_feature 1..711: note = source = /note="Description of Artificial Sequence: Synthetic coding sequence"
  source 1..711: mol_type = other DNA
atggccgtgatggctcctcgcacattagtgcttctgctgtctggagcactcgccctgacacagacttgggcagatatccagatgactcagtctccctcaactctatctgcaagtgtgggggatagggtaacaattacatgtaaatgccagcttagtgtgggatatatgcattggtatcagcagaaacccggaaaagcacccaagttactaatatatgatacatctaaacttgcttctggggtcccctccaggttttccggatctggatccggaacagaatttactctgacaatatcgtccctgcaacccgatgatttcgccacttactattgtttccagggaagtgggtatccttttacatttggggggggaactaagttagaaatcaaaaggacagttgccgcaccttctgtcttcattttcccaccttcagatgaacagctcaaatctgggacagccagtgttgtatgtctacttaataacttctatccccgggaagctaaagtacagtggaaagtggacaacgcccttcagtctgggaacagtcaggaatctgtcacagaacaggattctaaagactctacttattctctttcatcgacacttacactgtctaaagcagattatgaaaaacacaaggtgtatgcctgtgaggtcacgcatcagggactgtcgtctcccgtgactaaatctttcaaccgaggagaatgc

SEQ ID NO: 15228 - DNA, 711 bp, synthetic construct
  misc_feature 1..711: note = source = /note="Description of Artificial Sequence: Synthetic coding sequence"
  source 1..711: mol_type = other DNA
atggcagttatggcccccaggactctcgtattactgctttcaggcgccttggcactgacgcagacctgggctgatatccagatgactcagtctccatcaactctttcagcttcagtaggagatagagtaaccatcacatgcaaatgccagttgtcggtcggttacatgcactggtaccaacagaagcctgggaaggcccctaaattgttgatatacgatacttctaagctggcctccggagtaccgtctcgcttctccggctccgggtccggaacagagttcaccctgactataagctctctgcaacctgacgacttcgccacttactactgcttccaggggtctggatatccgttcaccttcgggggcggtacaaaactggaaattaagaggaccgtcgccgccccctccgttttcatctttcctccatctgatgagcagctgaagagcgggaccgccagtgtagtgtgcctgcttaataacttctatcccagagaggctaaggtgcaatggaaagtcgacaacgcgctgcaaagcggaaactcccaggagagtgtcaccgaacaggattccaaggatagcacctacagcttaagctcaacactgacactgtcaaaagcagattacgagaaacacaaagtgtacgcctgtgaggtaacccaccaagggctgtcctctcccgtgaccaaaagcttcaacagaggcgaatgt

SEQ ID NO: 15229 - DNA, 711 bp, synthetic construct
  misc_feature 1..711: note = source = /note="Description of Artificial Sequence: Synthetic coding sequence"
  source 1..711: mol_type = other DNA
atggcggtgatggctcctagaaccctcgtcttgctcctctcaggtgccctcgccctgacccaaacttgggccgacattcagatgacccagtccccgagcactctgtcggcatcagtaggtgaccgggttaccatcacttgtaaatgtcaactctcagtcggatacatgcactggtaccaacagaagcctggaaaggcgccgaaacttctgatctacgatacttcgaagctggcgagcggagtcccgtcccgcttttccgggtccggatctggcactgagtttaccctcaccatctccagcctgcaacccgacgacttcgcaacctactactgtttccaaggttccggataccctttcacgtttgggggaggtaccaagctcgaaatcaagagaactgtcgcagccccatccgttttcatttttccgccgtcagacgagcagctgaaatccggaaccgccagcgtcgtctgcttgctgaacaacttctatccgcgggaagcgaaggtgcagtggaaggtggacaatgcactccagagcggaaattctcaggaatcggtgactgagcaagactccaaggattcaacctactcgttgtcatcgaccctcaccctgtctaaggccgattatgaaaagcataaggtgtacgcctgtgaagtgacccaccaaggactctccagcccagtgactaagagtttcaaccgcggagaatgc

SEQ ID NO: 15230 - DNA, 711 bp, synthetic construct
  misc_feature 1..711: note = source = /note="Description of Artificial Sequence: Synthetic coding sequence"
  source 1..711: mol_type = other DNA
atggctgtcatggccccgcgcactttggtgctgctgctgtcaggcgccttggcgctcacacagacgtgggctgatattcagatgacgcagagtccctctaccctgtcagcctccgttggtgatcgcgtaactattacttgcaaatgtcagctttctgtagggtacatgcattggtatcagcagaaaccaggaaaagccccaaaactgttgatctacgatactagcaaacttgcctctggggttccctcccgcttctccgggagtgggtcagggactgagttcacgttgaccatatcttcccttcaaccagacgacttcgccacatactactgtttccagggctccggataccctttcacctttgggggcgggaccaagttggaaatcaaacgcacggtagctgccccatccgtgttcatctttcccccgtccgatgaacagttgaagagtggaactgccagtgtggtctgcctcctgaacaacttttacccgagagaagccaaggttcagtggaaagtggataatgccctgcaatcagggaattcccaggagtctgttacagagcaggactctaaagactccacgtacagcctgtcttcaacgctgacactctcaaaggctgattacgaaaagcacaaagtctatgcttgcgaggtcactcaccaaggccttagcagccccgtcacaaaatccttcaaccgcggagagtgc

SEQ ID NO: 15231 - DNA, 711 bp, synthetic construct
  misc_feature 1..711: note = source = /note="Description of Artificial Sequence: Synthetic coding sequence"
  source 1..711: mol_type = other DNA
atggcggtgatggctccacgcactctggtattgctgttgagcggtgccctggctctgacccagacctgggctgatatccaaatgacccaatcacctagcactctgagcgctagcgtgggtgaccgtgtgaccattacttgtaagtgccagctgagcgtgggctatatgcactggtatcagcagaaaccggggaaggctcctaagctgctgatctacgatacgtccaagctcgcgtccggtgtgcctagccgcttctcaggcagcggttccggtactgagttcaccctcactatctccagcttgcaaccagatgacttcgctacctattactgctttcaggggtccggatacccttttaccttcggtgggggtacgaagcttgagattaagagaaccgtcgcagcaccgtctgtttttatttttcctccgagcgatgagcaattgaagtccggcaccgcatctgttgtctgcctcctgaacaacttttatccgcgcgaggcaaaggtgcagtggaaagtggacaacgccctacagagcggtaatagccaggagagcgttaccgaacaggacagcaaggatagcacctactctctgtccagcaccctgactctctctaaggctgactacgaaaagcataaggtctatgcctgcgaggtcacccaccagggcctgagctctccggtgacgaagagtttcaatcgcggcgaatgc

SEQ ID NO: 15232 - DNA, 711 bp, synthetic construct
  misc_feature 1..711: note = source = /note="Description of Artificial Sequence: Synthetic coding sequence"
  source 1..711: mol_type = other DNA
atggcagtgatggctcccagaaccttggtgctgctcctcagcggggccttggccctcacccagacatgggcagacattcagatgacccagtccccaagtaccttgtcagcctccgtgggtgatcgcgtcactatcacgtgcaaatgccagcttagtgtggggtacatgcactggtatcagcagaagcccggtaaggccccaaagctgctgatatacgatacaagcaagctcgctagcggggtcccatccaggttttctgggtccgggtcaggcactgaatttaccctgaccatttcctccctccagcccgatgacttcgctacatattactgttttcaggggagcggatatccttttacctttggtggggggaccaaattggagatcaagcgaaccgtcgcggctcccagcgtctttattttccctcctagtgatgaacagctgaagtccgggaccgcctcagtcgtctgtctgctgaataatttttaccccagagaggccaaagttcagtggaaggtcgacaatgccctgcagtccggaaattcacaggagtccgtcactgagcaggacagcaaggattccacatatagtttgtcttccacactcactttgagtaaggctgattatgagaagcataaagtgtatgcttgcgaggtcactcaccaaggcctcagctcacctgtgaccaagtcattcaaccgaggggaatgc

SEQ ID NO: 15233 - DNA, 711 bp, synthetic construct
  misc_feature 1..711: note = source = /note="Description of Artificial Sequence: Synthetic coding sequence"
  source 1..711: mol_type = other DNA
atggccgtgatggcacctcggacactggtactgctgctgtccggcgctctggctctgactcagacctgggctgacattcagatgactcagagtccaagcaccttgtccgccagcgtgggtgatagggtgacaatcacgtgcaagtgccagctgtctgtcggttatatgcactggtatcaacaaaagccaggtaaggccccaaagctgctgatctacgatacctccaagctcgcgtctggcgtaccttcccggttttcaggcagcgggtccggcaccgaatttacccttactatcagcagcctgcagccagacgatttcgctacgtactattgtttccagggatccggctaccctttcaccttcggaggcggtacaaagctcgagatcaagcggaccgtagctgccccaagtgtttttatctttccgcctagcgacgagcaactcaaatctggcactgcttccgttgtctgccttctcaacaatttctacccccgggaagccaaggtgcagtggaaggtcgacaatgcactgcaatctggtaactctcaggaaagtgtgacagagcaggatagtaaagactccacctacagcctgtctagcacactcacactctcaaaggccgactacgaaaagcataaagtatacgcatgcgaagtgacccatcaagggctgtccagccctgtgacaaagagttttaacaggggcgaatgc

SEQ ID NO: 15234 - DNA, 711 bp, synthetic construct
  misc_feature 1..711: note = source = /note="Description of Artificial Sequence: Synthetic coding sequence"
  source 1..711: mol_type = other DNA
atggcagtgatggcaccaaggaccctggtcttgctgctttcaggggcattggcgctcactcagacctgggcggacattcaaatgacccagtcgcccagcacgcttagcgcctcggtgggagatcgagtgactattacttgcaagtgccaactctcagtgggatacatgcactggtaccagcagaagcctgggaaagcacctaaactgctgatatacgatacgtccaagctggcaagcggagtgccaagcagattctccgggtcaggttcaggcactgaatttacgctcacgatctcatccctgcaacctgatgattttgcaacttactactgttttcaaggctcaggatatccatttacttttgggggcggtactaagctggagatcaagcgtaccgttgcagctccttcggttttcatatttccccctagcgacgaacagctgaagtcgggaactgcgtccgtcgtctgtctcctgaacaatttctacccaagagaagcaaaggtccaatggaaggtcgacaacgctcttcaatcaggtaatagccaggaatccgtgaccgagcaagacagcaaggattcgacgtattcgctgtcatccactcttacgctctccaaagcagactacgaaaaacataaggtgtacgcttgtgaagtgacccatcagggccttagctcacctgtgaccaagtcattcaaccgtggggagtgc

SEQ ID NO: 15235 - DNA, 711 bp, synthetic construct
  misc_feature 1..711: note = source = /note="Description of Artificial Sequence: Synthetic coding sequence"
  source 1..711: mol_type = other DNA
atggcagtcatggcccctaggactcttgtcctgctgcttagcggagcccttgcactgacacaaacgtgggcagacattcagatgacccaatctccgagtacactttctgctagtgtgggcgaccgcgtgaccatcacctgcaagtgtcagttgagtgtcggctacatgcactggtatcagcagaagccaggcaaggcaccgaagctgctaatctacgatacaagtaaactggccagtggcgttccttcccggttctcaggttccggaagcgggacagagttcacactgactatctcatcactccagccagatgactttgcgacttattactgctttcaggggagtggatacccctttacttttggaggtggcacaaaactcgagattaagcgtaccgtggcagcaccatctgtgttcatattccctccatccgatgagcaactgaagagtgggaccgcatctgttgtatgtctcctcaacaacttttacccacgggaggcgaaggtgcagtggaaagtcgataatgcgttacaaagcgggaactcacaggaatccgttaccgaacaagatagcaaagactcgacttacagcctgtcttctactttgactctgtctaaggcagactacgagaagcataaagtgtatgcctgcgaagtaacccatcagggtctatctagccccgtgactaagtcgtttaataggggcgaatgc

SEQ ID NO: 15236 - DNA, 711 bp, synthetic construct
  misc_feature 1..711: note = source = /note="Description of Artificial Sequence: Synthetic coding sequence"
  source 1..711: mol_type = other DNA
atggcagttatggctcccagaactctcgtgctcctgctgtctggtgccctcgcgttgacacaaacatgggccgacattcagatgacacaatcacccagtaccctgtctgcatcagtgggcgaccgcgtcacaatcacctgtaagtgtcagctgagcgtgggctatatgcactggtaccaacagaagcctggcaaggcgcccaagctgctcatctatgatacaagcaagcttgcctctggcgtacctagcaggtttagtggcagtggtagcggcaccgagtttacccttactatatcttccctccagcccgacgattttgccacgtactactgcttccaaggttcaggctatccattcacatttggaggtggtaccaagctcgagatcaaacgcaccgtagccgctccatccgtgttcatcttccctccttctgacgaacaactgaaatccggcacggcttccgtagtctgcttgttgaataacttctatcccagagaggccaaggtacagtggaaggtggataacgcgctgcaaagtggaaactcccaggagtctgtcactgaacaggactctaaggactccacttattccttgagctccaccctgactctttctaaagccgattatgagaagcacaaagtatacgcatgcgaggtgactcaccagggcctcagcagtccagttacaaaaagtttcaacagaggagagtgt

SEQ ID NO: 15237 - DNA, 711 bp, synthetic construct
  misc_feature 1..711: note = source = /note="Description of Artificial Sequence: Synthetic coding sequence"
  source 1..711: mol_type = other DNA
atggctgtgatggcccccaggacgttggtgctgctgctttcgggtgcgctggccttgacccagacttgggccgatatccagatgacacaaagcccatcgacactgtcggcttctgtgggtgatcgcgtgaccatcacttgcaagtgccaactgtcagtgggttacatgcattggtaccagcaaaagccaggcaaggcccctaagctgctgatctatgacacaagtaagctggcgagcggcgtcccatctcgtttctcgggttccggctctggtacagaattcactttaactatctcgtcgcttcaacccgacgattttgccacctattactgcttccagggcagcggctacccgtttacttttggaggggggactaaactggaaattaagaggacagttgccgctccgagcgtgttcatattccctccctcggatgagcagctcaaatctggtactgcctcagtggtttgccttcttaacaacttttatccgcgggaggccaaggtacaatggaaggtagataatgccctgcaaagcggcaatagccaggagagcgtgacggaacaagactcgaaggactcaacgtacagcctgagttcgaccttaaccctcagcaaagccgattacgagaagcacaaggtctacgcctgcgaggtaacgcaccagggactgtcgagccccgtgacgaagagcttcaaccgcggcgagtgc

SEQ ID NO: 15238 - DNA, 711 bp, synthetic construct
  misc_feature 1..711: note = source = /note="Description of Artificial Sequence: Synthetic coding sequence"
  source 1..711: mol_type = other DNA
atggcagttatggctccgcggaccctggtgctgctgctcagcggcgcgttagcactcactcagacttgggcagacatccagatgacacagtctccttcaaccctgagtgcttctgttggagacagggtgaccattacatgtaaatgccagcttagtgtagggtatatgcactggtaccagcagaagccaggtaaggcgcctaaactactgatatacgatacatcaaaactagcctctggagttccttcgcggttcagtggctctggttctggaacagagtttacgctgaccatctccagtctgcagcccgatgatttcgctacgtattactgttttcagggcagcggctacccattcacttttggcgggggaaccaagctcgagatcaaacgaacagtggccgcgccttctgttttcatcttccctcccagtgacgaacagctgaaatctggcacggcgtcagtggtttgtttgctcaacaacttctatccgagagaggcaaaggttcaatggaaggtggataacgccctgcagtccggaaatagccaagaaagtgtgactgaacaagattctaaggatagtacttactctctgtcatctactctgactctctccaaagccgattacgaaaagcacaaggtgtacgcgtgtgaagtgacacatcaaggcctgtcttccccagttaccaagtccttcaaccgaggagagtgc

SEQ ID NO: 15239 - DNA, 711 bp, synthetic construct
  misc_feature 1..711: note = source = /note="Description of Artificial Sequence: Synthetic coding sequence"
  source 1..711: mol_type = other DNA
atggcagtaatggcacccaggacccttgtcctgcttctgtcgggcgcactcgctctgactcagacttgggccgacattcaaatgacccagtcgccttcgacgctcagcgcatccgttggagatagagtcactattacctgcaaatgtcaactttctgtcggttacatgcactggtaccaacaaaagcctggtaaggcgccaaaattgctgatatacgacaccagcaagctggcttcaggcgtaccaagccggttttccggatcggggagtggaaccgaatttaccctgaccatttcttctctgcaaccagatgattttgcaacttactactgtttccagggctccggctatccattcaccttcggaggtggaaccaaacttgagatcaaacggacggtggctgcacctagcgtgtttatctttcctccgtccgacgagcagctcaagtcgggtactgcctcagtggtgtgtctcctgaacaacttttacccccgcgaagcaaaggttcaatggaaggtggacaatgcgcttcagtcagggaattctcaagaatcagtgactgaacaggattcgaaggattccacctactcattgagctcgaccttgactctttccaaagccgattacgaaaagcataaggtgtacgcgtgtgaagtgactcatcagggactttcctcgcccgttaccaagtccttcaaccgaggggagtgc

SEQ ID NO: 15240 - DNA, 711 bp, synthetic construct
  misc_feature 1..711: note = source = /note="Description of Artificial Sequence: Synthetic coding sequence"
  source 1..711: mol_type = other DNA
atggctgtgatggccccacgcactcttgtgctgctgctgtccggagcgctggcgctcacccagacttgggcagacatccagatgactcagtcgccttcaacgctcagtgctagcgtaggtgaccgcgtgactataacctgcaaatgccaactgagcgtcggatacatgcattggtatcaacaaaagccggggaaagccccgaagctcctgatctacgatacctctaagctggcctccggggtgccatcacggttttccgggtcaggctcgggcaccgagttcaccttgaccatttcgagtttgcagcctgacgactttgccacgtactactgcttccagggtagcggataccccttcaccttcggaggaggcaccaagctggagatcaagaggactgtggcagccccttcggtgttcatcttccccccgtcagatgaacaacttaagagtgggacggcctccgtggtctgcctcctgaacaatttctatccgagagaagcgaaggtccagtggaaggtcgacaacgctctgcagtcgggtaactcgcaagagtcggtgactgaacaggactcaaaagatagcacctacagcctttcatcaactttgaccctctcgaaagcggattacgaaaagcacaaagtgtacgcatgtgaggtcacgcatcagggcctctcgagccccgtgactaagtcgtttaatcgaggcgaatgt

SEQ ID NO: 15241 - DNA, 711 bp, synthetic construct
  misc_feature 1..711: note = source = /note="Description of Artificial Sequence: Synthetic coding sequence"
  source 1..711: mol_type = other DNA
atggcagttatggccccacgcactctcgttctattgttgagtggtgcactagcgttaacgcaaacgtgggctgatatccaaatgactcagagtccatccactctttctgcttccgtcggcgatcgagtcacaataacttgtaaatgtcaattaagcgtgggatacatgcactggtatcaacagaaacccggtaaagcgccaaaacttctcatttatgatacatctaagttggcctcaggagtgccgtccagattctcaggttctggatcaggtaccgagttcacgctcactataagtagcctccagccggatgattttgccacatactattgcttccaaggttctggctatccattcacatttgggggaggaactaaacttgagataaaacggacagtggcagccccatcagtctttatctttccaccttcggatgaacaactgaaatcaggtactgcttctgtggtgtgcctccttaacaacttctacccaagagaagcaaaagttcagtggaaggtggacaatgctttacaatccggaaactcgcaggaatccgtgacggagcaggattctaaagactcgacctattcactctcctcaacattgaccctttccaaagcagattatgagaaacacaaagtttacgcttgtgaggttacccaccaaggactttcatctccggttacgaagtctttcaacagaggagagtgt

SEQ ID NO: 15242 - DNA, 711 bp, synthetic construct
  misc_feature 1..711: note = source = /note="Description of Artificial Sequence: Synthetic coding sequence"
  source 1..711: mol_type = other DNA
atggcagtcatggcccctcgcacactggtcctgctgctcagcggagctctcgcactgactcagacctgggcggacatccagatgacgcagtctccctctacattgagcgcgagtgtgggggatcgggtaacaatcacctgtaaatgtcaattgtccgtaggttatatgcattggtatcagcagaaacccgggaaagccccgaaactcctgatttacgacacatccaagctagcctccggcgtgcccagcagattttcaggctctggttcaggcaccgaatttactctgaccatctcctctttgcagcccgacgatttcgccacttattactgtttccagggatctgggtacccattcacattcggtggtgggactaagctggaaatcaagcgcactgtcgccgctcctagcgtgtttatattcccgcctagtgatgagcagttgaagtctggtacagcttccgtagtatgcttgctgaataatttttaccctcgggaagctaaagtgcagtggaaagtcgacaatgcactacagtcaggaaactcacaggaatctgttactgagcaggatagtaaggactccacctactccttgtcaagcacccttactctgagcaaagccgactatgaaaagcataaggtttacgcttgcgaagtgacccaccaggggctgagttctccagtaaccaaaagtttcaatcggggcgaatgt

SEQ ID NO: 15243 - DNA, 711 bp, synthetic construct
  misc_feature 1..711: note = source = /note="Description of Artificial Sequence: Synthetic coding sequence"
  source 1..711: mol_type = other DNA
atggctgttatggctccccgaaccttggtcttgctgctgagtggtgcgctggcgctcactcagacatgggcagacatccagatgacccagtcgccttctaccctatctgcctcagttggagacagggtcacaatcacctgcaaatgccaactttctgtcgggtacatgcactggtaccagcaaaagcctgggaaggctcctaagctgctgatctacgatacatccaagctggcaagtggagttcccagccgcttcagtggcagcgggagcgggacagaatttacactaacgatctcatcccttcagccagacgattttgcgacctactattgtttccagggaagtggttatccattcactttcggaggaggtaccaaattagaaataaagagaaccgttgcagccccctcagtgttcatattccctcccagcgatgagcaactgaagtccgggaccgctagtgttgtgtgtctgctgaataatttttaccccagggaggccaaggtgcagtggaaagtggataacgctctgcagagcgggaactctcaggaatctgtgacagagcaggactctaaggatagtacatatagcctgagttcgaccctgactttgtccaaggccgattacgagaagcacaaggtctacgcatgtgaggtcacccatcaaggcttatcctcacccgttacaaaatcgtttaaccgcggagagtgt

SEQ ID NO: 15244 - DNA, 711 bp, synthetic construct
  misc_feature 1..711: note = source = /note="Description of Artificial Sequence: Synthetic coding sequence"
  source 1..711: mol_type = other DNA
atggctgtgatggctccacgcacacttgtgcttctgctttcaggagcactcgcattgacacagacctgggcagatatacaaatgactcaatccccttccactctttctgcttccgtgggtgacagggtgactattacctgtaagtgccaacttagcgttgggtatatgcactggtaccaacagaaaccgggtaaggcaccaaagcttctgatctatgatacttccaagttagcttctggtgttccaagccggttctctgggtccggaagtggaaccgagttcacactcacaatcagctctcttcagcccgatgattttgctacgtactattgctttcagggtagtggttatccttttacatttggaggcggaaccaagctcgagattaaaagaactgttgctgcccctagcgttttcatcttccctccatctgacgaacaacttaaaagcggaacggcctctgttgtttgcctgttgaacaacttctatcccagggaagcaaaagtccagtggaaagtagataacgcattgcagtctggtaactctcaagagtccgtcaccgagcaagactctaaggacagtacttacagcctgtcttcaaccttgacattgtctaaagctgactatgaaaagcataaagtttatgcttgtgaggtaacccaccaggggttatccagtcccgtgaccaaaagttttaatcgtggggaatgc

SEQ ID NO: 15245 - DNA, 711 bp, synthetic construct
  misc_feature 1..711: note = source = /note="Description of Artificial Sequence: Synthetic coding sequence"
  source 1..711: mol_type = other DNA
atggccgtgatggccccaaggaccctggtgctgttactgtccggagccctggcccttacccagacatgggccgacatccagatgacccagtctcccagcactctatctgcatctgtgggcgaccgagtcacgattacttgtaagtgccagctgtccgtcggttacatgcactggtatcagcagaaaccgggcaaggctcccaagctgctgatatacgacacatcgaaactggcatcaggcgtgccatcaagattctccgggtccgggtccggcaccgagtttaccctcacgattagctccctgcagccagatgatttcgcgacttactattgtttccagggttccggttacccttttacatttggcgggggaacgaagttagagattaagcgaaccgtcgcggcgccgtcggtcttcattttcccaccatctgacgagcagttgaagtcggggaccgcttctgtcgtctgtctattgaataacttctatcccagggaggccaaggtacagtggaaggtggataacgcactgcagagcggcaactcgcaagagtccgtgacagagcaggatagcaaagatagcacttactcactaagcagcacgcttaccttgagtaaagccgactacgagaaacacaaagtctacgcatgtgaggtcactcatcagggactgagttcccccgttacaaagtcattcaacaggggcgaatgc

SEQ ID NO: 15246 - DNA, 711 bp, synthetic construct
  misc_feature 1..711: note = source = /note="Description of Artificial Sequence: Synthetic coding sequence"
  source 1..711: mol_type = other DNA
atggccgtgatggcacctagaactctggtgcttctgctgtccggagcactggcacttacccaaacttgggcagacattcagatgactcaatcaccttccaccctgtcggcatccgttggagatagagtgactattacgtgtaagtgccagctctccgtcgggtacatgcattggtaccagcaaaagccagggaaggcgcccaagctgctgatctacgatactagcaaactggcatcaggagtgccttcgcgctttagcggctccggttccgggaccgagtttacgctcacgatttcctcccttcaaccagatgattttgcgacctactattgtttccagggttccgggtacccttttactttcggaggaggaaccaaacttgagatcaagaggaccgtggccgcaccttcggtgttcatcttcccaccttctgatgagcagctgaagtccggaaccgcatcagtggtttgcctgctcaataacttttacccgcgagaagcaaaggtgcagtggaaagtggacaatgcacttcaatcgggaaattcacaagagtccgtgactgaacaagactcgaaagacagcacttactccctctctagcaccctgaccctgtccaaggcagattacgaaaaacacaaggtgtatgcctgtgaggtgacccatcaaggactgtcctcgcctgtgacgaaatcgttcaacagaggcgaatgc

SEQ ID NO: 15247 - DNA, 711 bp, synthetic construct
  misc_feature 1..711: note = source = /note="Description of Artificial Sequence: Synthetic coding sequence"
  source 1..711: mol_type = other DNA
atggcggtgatggccccccggacccttgtgttgctgttaagcggagcattggccctcacgcagacgtgggctgacatccagatgacccagtccccaagcacactgtccgctagtgtcggcgaccgagtgaccattacctgcaagtgccaattatccgtggggtatatgcactggtaccagcagaagcctgggaaggcccccaagctgttaatttacgacacctccaagctcgccagcggtgtcccctctcgattttctggatccggaagtggtacagagtttacactgacgatctctagcctgcagcctgacgactttgccacttactactgttttcaagggtcaggctacccttttacttttggtggtggtacaaagctcgagatcaagcgcaccgtggctgcgccctcagtcttcatatttcccccttctgatgagcagctgaagtcaggcacagctagcgtggtgtgtttgctgaataatttttacccgagggaagctaaagtccagtggaaggtagacaacgcattacagagtggcaacagccaggaatcagttactgaacaggattccaaggattcgacctactcactgagctctaccctaaccctgagtaaggccgattatgagaagcataaagtgtatgcttgtgaagtgactcaccagggcctttctagtcctgtgactaaatctttcaaccgcggcgaatgt

SEQ ID NO: 15248 - DNA, 711 bp, synthetic construct
  misc_feature 1..711: note = source = /note="Description of Artificial Sequence: Synthetic coding sequence"
  source 1..711: mol_type = other DNA
atggccgtcatggcaccccgcaccctggtcttgttattgtcgggagcattggctcttacccaaacttgggccgacattcagatgacccagtcaccgagcacactgagcgcctcagtgggtgacagggtgaccatcacttgtaaatgtcaattatccgtaggttatatgcactggtaccagcagaaaccggggaaggcgcctaagcttctgatttacgacacgtccaagcttgcttcaggtgtgcccagccggttcagcggaagcggctctggaactgagttcaccctcaccataagtagcctgcaaccggacgattttgctacgtactactgttttcaaggcagtggttaccctttcacgtttgggggtgggactaagctggaaattaaaaggaccgtcgccgcaccttcagtgtttattttccctcccagtgacgaacagttaaaatctgggactgcgtccgtagtatgtctgctaaataacttttatccccgtgaagctaaggtccagtggaaagtggacaatgccctgcaatcaggaaattctcaggaatccgtgaccgagcaagacagcaaagacagcacctactcactcagcagcacccttacgttgagtaaggctgattacgagaaacacaaggtctacgcctgcgaggtcacccaccagggcctttcctctcccgtgacaaaatcattcaacaggggcgagtgt

SEQ ID NO: 15249 - DNA, 711 bp, synthetic construct
  misc_feature 1..711: note = source = /note="Description of Artificial Sequence: Synthetic coding sequence"
  source 1..711: mol_type = other DNA
atggccgttatggccccaaggaccctggtactccttctgagtggggctctggcgctgacacagacttgggctgacatccagatgactcagagtccttcaaccttatccgcctccgtgggcgatcgtgtcaccatcacgtgtaagtgccagctgagcgtaggctacatgcattggtatcagcagaagccgggaaaagcgccgaagttgcttatttacgatacttctaagctggcctccggtgtcccctctcgatttagcggaagcgggtccgggacggaattcaccctaactattagcagtctgcagcccgatgattttgccacttactattgcttccagggctcaggatacccatttaccttcgggggtggtactaaactggaaattaagagaaccgttgcggcccccagcgtgttcatctttccaccttctgacgaacagctgaagtccggcacagcctcggtggtgtgtcttctgaataacttctatccacgggaagccaaggttcagtggaaggtggataacgcgctgcaaagcggcaattctcaggagtctgtcacagaacaggactcaaaggattcaacatatagcctttccagcacccttacactgtccaaggccgactacgaaaagcacaaggtgtacgcatgcgaggtgactcatcagggcctgtccagtccagtcaccaagtcttttaataggggagagtgc

SEQ ID NO: 15250 - DNA, 711 bp, synthetic construct
  misc_feature 1..711: note = source = /note="Description of Artificial Sequence: Synthetic coding sequence"
  source 1..711: mol_type = other DNA
atggcagtgatggcacctcgcactctcgtgctcctgctgtccggtgcactggcactcactcaaacttgggcagatattcaaatgactcagtcaccttcgactctgtcagccagcgtgggagatcgagtgaccattacctgcaagtgccagctgagcgtcggatacatgcattggtaccaacagaagcctggtaaggcaccaaagttgcttatctacgatacctcaaagctggcatccggtgtgccttcccggttttccggttctggatccgggaccgagtttactctcaccatctcctcccttcaacctgacgacttcgcgacctactactgttttcaaggatccggttacccttttacttttggaggtggaaccaaactggagattaagagaaccgtggctgccccatcagtgtttatcttccctccaagcgacgagcagctgaagtcgggcactgcatccgtggtgtgtctgcttaacaatttctaccccagagaagcaaaggtccagtggaaggtcgataacgcactccagagcggtaactcccaggaaagcgtgactgagcaggattcaaaggactcgacctattccttgtcctcaactcttactctttcgaaagcagattacgagaagcacaaggtgtacgcatgtgaagttacgcatcaaggactgtcgagccccgtcactaagtcgtttaaccgcggcgaatgt

SEQ ID NO: 15251 - DNA, 711 bp, synthetic construct
  misc_feature 1..711: note = source = /note="Description of Artificial Sequence: Synthetic coding sequence"
  source 1..711: mol_type = other DNA
atggcagtcatggcccctagaacactggtcctccttctgagcggggcactggctctaacacaaacatgggcagatatccagatgacacagagtccgagcactttgtccgctagcgtgggcgatcgagtcacaataacatgtaagtgtcagctcagtgtcggttacatgcattggtaccagcagaagcctggaaaggcacctaaattgctgatctacgacactagtaagttggcgagtggagttccttcacggttttcaggctccgggagcgggaccgaatttaccctcaccattagcagcctgcagccagacgatttcgccacttattactgttttcaaggatccggataccccttcacattcggtggcggtaccaaactggaaattaagaggactgtggctgctcctagcgtgttcatcttcccgccctccgacgagcagcttaagagcggaacagcctccgttgtgtgtctcctgaacaatttctatccgagggaagcaaaagttcagtggaaggtggacaacgctcttcagtctggaaactcgcaggagagtgtgactgaacaagacagcaaagactctacttactccttgtctagcaccctgaccctctccaaagctgattatgaaaagcacaaggtatacgcgtgcgaggtaacacatcaggggcttagctcccccgtgactaagtcgttcaatcggggggagtgc

SEQ ID NO: 15252 - DNA, 711 bp, synthetic construct
  misc_feature 1..711: note = source = /note="Description of Artificial Sequence: Synthetic coding sequence"
  source 1..711: mol_type = other DNA
atggcggtgatggccccaagaacgcttgtgctgctcctttcgggagcgctcgccctgacccagacctgggctgacatccaaatgactcaatctccctcgaccttgtccgcgtcggtgggcgaccgcgttactatcacctgtaaatgtcagctcagtgtgggctacatgcactggtaccagcagaagcctggcaaggccccgaagctccttatctacgataccagcaaactggcctcaggagtgccttcacgcttttccggaagcggatcagggaccgaattcaccctgactatctcctccctccaaccggacgacttcgccacctactactgctttcaaggttccggctacccattcacctttggcggcggtaccaaactcgagatcaagcgcaccgtggctgccccgtcggttttcatcttcccaccgtcggatgaacagcttaaatcaggaaccgcgtcagtggtgtgcctcctgaataacttctaccctagagaggccaaggtgcagtggaaggtggacaatgcactgcagtcgggcaactcacaggaatccgtgactgaacaggactccaaagactcgacgtactccctgagctcaacgctcaccctgagcaaggcggactatgagaagcacaaggtctacgcctgcgaggtcactcatcagggcctctcgtcgccagtgactaaatcgttcaataggggtgagtgc

SEQ ID NO: 15253 - DNA, 711 bp, synthetic construct
  misc_feature 1..711: note = source = /note="Description of Artificial Sequence: Synthetic coding sequence"
  source 1..711: mol_type = other DNA
atggcagtgatggcaccgcgcacgctggtgctgttgctgtccggggcactggccctcacgcagacctgggctgatatccaaatgacgcagtccccatccaccctgagtgctagcgtgggtgaccgcgtcaccataacatgcaaatgtcagttgagcgtgggctacatgcattggtaccagcagaaacccggcaaggcccctaagctgctgatttatgatacttcaaagctagcttcaggtgtgccatccaggtttagcgggtccggcagcggcacagaatttactctgactatatcttcgctgcagcccgatgactttgcaacttattattgctttcaggggagtggctacccatttacattcggtggtgggacgaagctggaaatcaaacggaccgtcgcggcgccatcagtattcatcttcccgccctccgacgagcaactgaaatccggtaccgcgagtgtggtgtgccttctaaataacttctaccccagagaagctaaggtgcaatggaaagtggataacgccctacaatctggaaatagccaggagtcagtgaccgaacaagatagcaaggattcgacctactcactctctagcacgctcacgttgagtaaggcagattacgagaaacataaggtatacgcatgtgaagtgacccatcagggtctctctagccccgtgaccaaaagtttcaaccggggagaatgt

SEQ ID NO: 15254 - DNA, 711 bp, synthetic construct; identical to SEQ ID NO: 15249
  misc_feature 1..711: note = source = /note="Description of Artificial Sequence: Synthetic coding sequence"
  source 1..711: mol_type = other DNA

SEQ ID NO: 15255 - DNA, 711 bp, synthetic construct
  misc_feature 1..711: note = source = /note="Description of Artificial Sequence: Synthetic coding sequence"
  source 1..711: mol_type = other DNA
atggctgtgatggcaccacggactctcgttctgcttctttcaggcgcactcgccctgacgcaaacttgggctgacatacaaatgactcagtctccctctacgcttagcgcaagtgtgggtgacagggttactattacgtgtaagtgccaactgtcagtgggatacatgcactggtaccagcaaaagcccggcaaggcaccaaaattgcttatctacgatacctccaagctggcgagcggagtcccctcgagattctcggggagcggctcgggaaccgaatttactctgactattagctcccttcagcctgatgactttgccacctactactgttttcaaggtagtggttatccattcacctttggaggagggaccaagttggagatcaaacgcaccgtggcagcgccatccgtgtttatcttccctccttcggacgagcagttgaagtcaggcaccgcatcagtcgtgtgtctgctcaacaatttctaccctcgggaagcgaaggtgcaatggaaagtagataacgccctccagtccggaaattctcaggagtccgtcaccgaacaagattcgaaggatagcacttactcactgtcgtctactctcaccctttccaaggctgattacgaaaaacataaagtgtacgcatgtgaagtgacccatcagggactctcttcacctgtgaccaaatcgtttaaccgaggggaatgc

SEQ ID NO: 15256 - DNA, 711 bp, synthetic construct
  misc_feature 1..711: note = source = /note="Description of Artificial Sequence: Synthetic coding sequence"
  source 1..711: mol_type = other DNA
atggcagtgatggcgccaagaacgctggtgctgctcctgtcaggcgccctcgctcttactcagacgtgggcagatattcagatgactcaatcgccctcaactctttccgcatccgtcggcgatcgagtgaccattacctgtaagtgccaattgtcagtcggctacatgcactggtaccaacaaaagccaggaaaggcaccaaaattgctcatctacgatacctccaagctcgcctcgggtgtcccgagcaggttcagcggctccggctcaggcactgaatttacccttaccatttcgtcgctgcagcccgatgactttgccacctactattgttttcagggatcaggttacccatttactttcgggggaggaactaagttggagattaaacgcaccgtggccgcaccttcagtgtttatcttccctcctagcgacgaacagctgaagtccggcacggcctcggtggtgtgtctgctcaataacttctatccgcgggaggcaaaggtgcagtggaaggtcgacaacgcgctccagtcgggaaacagccaagagagcgtgactgagcaagatagcaaggactcaacttacagcctgtcgtctaccctgactctttcaaaagctgattatgagaaacataaggtctacgcatgcgaggtcactcatcaaggccttagctcgcccgtgactaagagctttaatcgcggagaatgt

SEQ ID NO: 15257 - DNA, 711 bp, synthetic construct
  misc_feature 1..711: note = source = /note="Description of Artificial Sequence: Synthetic coding sequence"
  source 1..711: mol_type = other DNA
atggccgtaatggcaccaaggacgttagtgttactgttaagcggggcactcgccctgactcaaacctgggccgatattcaaatgactcaatcgccttccactctctcagcgtcggttggcgatagagtaacaatcacgtgtaaatgtcagctatccgttgggtacatgcactggtatcagcaaaaacccggcaaagctcctaagcttctcatatacgacacaagtaaattggcaagcggggtcccttctaggtttagcggatctgggtccggcacagagttcactcttactatttccagtctccaaccagatgatttcgctacctactattgcttccagggctccgggtatccattcacattcggcggggggaccaagttagagataaagcggaccgtggctgcaccttctgtgttcatcttccccccaagcgacgaacagctcaaaagcggcactgccagcgtggtgtgcttgctcaacaacttttacccacgcgaggctaaggtacagtggaaggtggataacgcccttcagtccggcaacagtcaagagagtgtgacagagcaggattctaaggattctacctactctctcagcagtacactgaccctaagtaaggcagactatgagaaacacaaggtatatgcctgtgaagtgacacatcaggggctaagtagccccgttacaaaaagttttaaccgtggcgagtgc

SEQ ID NO: 15258 - DNA, 711 bp, synthetic construct
  misc_feature 1..711: note = source = /note="Description of Artificial Sequence: Synthetic coding sequence"
  source 1..711: mol_type = other DNA
atggcggtgatggccccgaggaccctcgtcctgctcctgagcggagccctggctctcacccaaacttgggccgacattcaaatgactcaatcgcctagcaccctgtcggcgtcggtgggagatcgggtgactataacgtgcaaatgtcaactgtcggtgggctacatgcattggtatcagcaaaagccaggaaaggcgccaaagctgttgatctacgacacgagcaagctcgcctccggagtcccatcccgcttctccgggtccggatcggggactgagtttaccctgactatcagctccctccagccagatgactttgcgacctattactgcttccagggatcgggatacccgttcactttcggaggaggaactaaactggagatcaagcggactgtggcggctccctccgtgttcatcttcccgccttcggatgaacagctcaagtccggaaccgcctcggtggtctgcctgctgaacaatttctacccgcgcgaggcaaaagttcaatggaaggtcgacaacgccctgcaatcgggaaattcacaggagtccgtcactgagcaggacagcaaggattcaacttactccctgtcatccaccctgaccttgtcaaaggctgattacgagaagcataaggtgtacgcttgtgaggtgactcaccagggtttgtcgtcgccagtgactaaatccttcaatagaggcgaatgc

SEQ ID NO: 15259 - DNA, 711 bp, synthetic construct
  misc_feature 1..711: note = source = /note="Description of Artificial Sequence: Synthetic coding sequence"
  source 1..711: mol_type = other DNA
atggccgtgatggcaccacgcactttggtgctgctgctgtcaggggctctcgcgttgacccaaacttgggccgacatccaaatgactcagagcccgagcaccctgtctgccagcgtcggagatagagtgaccatcacctgcaagtgccaactgagcgtgggttacatgcattggtaccagcagaagccgggaaaggcgcccaaactgctgatctacgacacgtccaagctggcttcaggagtgccttcgcggttctcgggctccggatcggggactgagtttacccttactatcagctcgctccaaccggatgatttcgcgacgtactactgctttcagggctcgggatacccgttcacttttggtggcggaaccaagctcgaaatcaaacggactgtggcggccccttcagttttcattttccccccgtcagacgaacagctcaagtccgggacggcctccgtcgtctgtctcctgaacaatttctacccaagggaggcaaaagtccagtggaaggtcgacaatgctttgcagtccggcaactcgcaggagtccgtgactgaacaggattcgaaagacagcacttactcactcagctcgaccctgaccctttcgaaggccgactatgagaagcacaaagtgtacgcatgtgaagtgacccaccaaggactgtccagtccagtgaccaagtccttcaaccgcggagaatgc

SEQ ID NO: 15260 - DNA, 711 bp, synthetic construct
  misc_feature 1..711: note = source = /note="Description of Artificial Sequence: Synthetic coding sequence"
  source 1..711: mol_type = other DNA
atggcagtgatggcgccacgtactcttgtgctgctgctttccggagcccttgcgttgactcaaacgtgggcggacattcagatgacgcaatcgccatctaccctttcggcctcggtcggggatcgggtcaccatcacttgtaaatgccagctgagcgtcggatacatgcattggtatcagcaaaagcccggaaaggcacccaaactccttatctacgatactagcaaactggcctcgggggtgccttcaaggttcagcggcagcggctcgggaacggaatttaccctcaccatttcctcgctgcaacctgatgattttgctacctattactgcttccagggtagtggctaccctttcacttttggtggtggcactaagctggagattaagagaactgtggcggcaccatcagtgtttatcttcccgccaagcgatgagcagttgaagtcgggaactgcttctgtcgtgtgtttgttgaacaacttctaccccagagaggccaaggtgcagtggaaggtggataacgcactgcaatccggtaattcacaagaatcagtcactgaacaggacagcaaagactcgacgtactcactttcatcgaccctgaccctgtcgaaggcggactacgaaaaacacaaggtgtacgcgtgcgaagtcacccatcagggtttgagctcccctgtcactaagtcgtttaatcggggagaatgt

SEQ ID NO: 15261 - DNA, 711 bp, synthetic construct
  misc_feature 1..711: note = source = /note="Description of Artificial Sequence: Synthetic coding sequence"
  source 1..711: mol_type = other DNA
atggctgtgatggccccacggactctcgtgctgttgttatctggagctctggccctgacccaaacctgggcggacattcagatgacccagtctccctcaacgctgtctgcatccgttggcgaccgcgtaacgatcacttgcaagtgtcagctgagcgttggttacatgcactggtatcagcaaaaaccaggaaaggccccgaaactcctgatctacgatacatctaagctcgcaagcggtgtgcccagcaggttctctggcagtggatctgggactgagttcactctcacaatatcctctctgcagcctgacgacttcgccacctactattgttttcagggcagcggctatccgtttacttttggtggaggcactaagctcgaaattaagcggaccgtggcagctccatcagtctttatcttcccaccatctgacgaacagctgaaaagtggtactgcatcagtggtgtgtctgctgaacaatttctatccccgggaggccaaggtccagtggaaggtcgacaacgccctgcagtccggcaacagccaagagtccgtaaccgagcaggatagcaaagacagcacatacagcctatcatctactctcactctgagcaaagcagattatgaaaagcataaggtttacgcctgcgaagtcactcaccagggcctctcctcacccgtaaccaagagttttaatcgaggggaatgc

SEQ ID NO: 15262 - DNA, 711 bp, synthetic construct
  misc_feature 1..711: note = source = /note="Description of Artificial Sequence: Synthetic coding sequence"
  source 1..711: mol_type = other DNA
atggcagtcatggcaccccgcacgctcgtccttctgctcagcggtgcgctcgccttgactcagacctgggcggatatccaaatgactcagtcgccatcgactctgtcggcctctgtcggtgatagggtgaccattacttgcaaatgccagctgtcggtgggatatatgcactggtaccagcaaaagcccggaaaggcgcctaaacttttgatctacgacacctccaaattggcatccggagtcccttcacggttttcggggtcgggatcgggaactgaatttacccttacgatctcgtcacttcagccggatgacttcgcaacctattactgctttcaagggtccggttacccttttacttttggcggtggaactaaactggagattaagcgaaccgtggcagcccccagcgtgttcatattcccaccatccgatgaacagctcaagtcgggcaccgcctcagttgtgtgtctccttaacaatttctacccgagagaagccaaagtgcaatggaaagtggataacgcactccaatccggaaattcccaagaatcggtcaccgagcaagattcgaaagatagcacctactcactttcgtccactcttaccctgtcaaaggcggactacgagaaacataaggtgtacgcatgcgaagtgacccatcagggactttcctcccctgtgactaagagctttaaccgtggagaatgc

SEQ ID NO: 15263 - DNA, 711 bp, synthetic construct
  misc_feature 1..711: note = source = /note="Description of Artificial Sequence: Synthetic coding sequence"
  source 1..711: mol_type = other DNA
atggctgtcatggctccccgcacgttggtgcttctactgtccggcgctttagcactcactcaaacgtgggcagatatccagatgacgcagtctccctcgaccctctctgctagtgtcggggatagggtgaccatcacctgcaagtgccagctgtctgtcggttatatgcattggtaccagcagaagccgggtaaagccccgaagcttctcatctacgacaccagcaagctcgcctctggagtgccctctcgcttctcgggtagcggcagcggcaccgagttcaccctcaccatttcttcactgcaaccggacgatttcgcaacttactactgcttccagggaagcggttacccttttactttcggtggaggaaccaagttggagatcaagcgtacggtcgctgctcctagtgtcttcattttcccccctagcgatgagcaactcaaatctggcaccgccagcgtcgtctgcctcctgaacaacttttatccacgtgaagctaaggtgcagtggaaggtcgacaatgcacttcagagtggcaattctcaagagagcgtcaccgaacaggacagcaaggattcgacttactctctgtcgtccaccctcaccttgtccaaggccgactacgaaaagcataaggtctatgcctgtgaggtcacacaccagggcctcagctcgccagtgacgaagtcctttaaccggggagagtgc

SEQ ID NO: 15264 - DNA, 711 bp, synthetic construct
  misc_feature 1..711: note = source = /note="Description of Artificial Sequence: Synthetic coding sequence"
  source 1..711: mol_type = other DNA
atggccgtgatggccccacggactctggtgctgctcctgtctggcgccctggcactcacccaaacctgggccgatatccagatgactcagtcaccgagcacgctgtcagccagtgtgggggaccgcgtgacgataacgtgcaagtgccagctcagcgtcggatatatgcactggtaccagcagaagccgggcaaggccccgaagttgctgatctacgatacctccaaactggcatcgggtgtgccgtcgaggttctccggaagcggctcgggaactgagttcactctgaccatctcatcactgcagccggatgatttcgcgacgtactactgcttccaaggttccggttacccctttacttttggaggcggaaccaaactcgaaatcaagcggaccgttgccgccccatccgtgtttatcttcccaccgtcggatgaacaactgaaatcgggcaccgctagcgtggtctgtctgctcaataacttttacccgcgggaggccaaggtgcagtggaaagtcgacaatgcgctgcaaagcggaaattcccaggaatcggtgactgaacaggattcaaaagattcaacctactcgctgtcctcaaccctcaccctgtccaaggctgactacgagaagcataaagtctacgcttgcgaggtcactcaccaaggactgtcatcgcccgtcaccaagtcctttaaccggggagagtgc

SEQ ID NO: 15265 - DNA, 711 bp, synthetic construct
  misc_feature 1..711: note = source = /note="Description of Artificial Sequence: Synthetic coding sequence"
  source 1..711: mol_type = other DNA
atggcggttatggcgccgcgtacgttagtactattactatcgggtgcgttagcgttaacgcaaacgtgggcggatatacaaatgacgcaatcgccgtcgacgttatcggcgtcggttggtgatcgagtaacgataacgtgtaaatgtcaattatcggtaggttatatgcattggtatcaacaaaaaccgggtaaagcgccgaaactattaatatatgatacgtcgaaactagcgtcgggtgttccgtcgcgtttttcgggttcgggttcgggtacggaatttacgttaacgatatcgtcgttacaaccggatgattttgcgacgtattattgttttcaaggttcgggttatccgtttacgtttggtggtggtacgaaactagaaataaaacgaacggtagcggcgccgtcggtatttatatttccgccgtcggatgaacaactaaaatcgggtacggcgtcggtagtttgtctattaaataatttttatccgcgtgaagcgaaagttcaatggaaagtagataatgcgttacaatcgggtaattcgcaagaatcggtaacggaacaagattcgaaagattcgacgtattcgttatcgtcgacgttaacgctatcgaaagcggattatgaaaaacataaagtatatgcgtgtgaagttacgcatcaaggtctatcgtcgccggttacgaaatcgtttaatcgtggtgaatgt

SEQ ID NO: 15266 - DNA, 711 bp, synthetic construct
  misc_feature 1..711: note = source = /note="Description of Artificial Sequence: Synthetic coding sequence"
  source 1..711: mol_type = other DNA
atggccgtaatggcccccagaacgcttgtgttgttgctgtcaggagccctcgcactgacacaaacgtgggcagatatccagatgacccaaagtccatcaacccttagcgccagcgtcggcgacagagttactattacatgcaaatgtcagctcagcgttggttatatgcactggtaccagcagaagccgggcaaagctcccaaacttcttatttatgatactagcaagttggccagtggcgtacctagccgtttcagcggttccggatccggcacagagttcactttgacaattagctcactgcaaccggatgactttgctacttactattgcttccaggggtcagggtatccattcacattcggaggcgggaccaagttagagatcaaacgaaccgtggccgctccaagtgtatttatttttcctccgtccgacgaacaactcaagagcgggactgcgtcagtggtttgcctcctaaataatttttatcctcgtgaagctaaagtgcagtggaaggtagacaatgccctgcagagcggcaatagccaggaatctgttacagagcaggacagtaaagactcaacgtacagcctgagcagtacattgacgttgtccaaggctgactatgagaaacataaagtgtatgcctgtgaggtgacccatcagggtctatcctcacctgtgactaaatcctttaaccgcggcgagtgc

SEQ ID NO: 15267 - DNA, 711 bp, synthetic construct
  misc_feature 1..711: note = source = /note="Description of Artificial Sequence: Synthetic coding sequence"
  source 1..711: mol_type = other DNA
atggcggtgatggcacctcggactttggtgttgctgctctccggcgccctcgcgctcactcaaacatgggctgacatacaaatgacccaaagtccgtctacactgtcggctagcgttggagatagagtcaccattacgtgcaagtgtcagctaagcgttgggtacatgcactggtaccagcagaagccaggaaaggccccaaagttgctgatttacgacacaagcaagcttgcgtctggcgtccctagtcgcttctctgggtccggatctggcaccgaattcaccctcacaatcagctcattgcagccagacgatttcgctacgtattattgcttccagggaagcggatacccctttacgtttgggggcggcaccaaactggagattaaaagaactgttgcagccccctccgtgttcatctttcccccttctgatgaacagctaaagtcaggcaccgcttcagtcgtatgtctcctgaacaatttttaccctagagaggcaaaagtgcagtggaaagtggacaatgcactgcagtcgggcaattctcaggagtccgtgactgaacaggacagtaaggactccacctatagcctgtcctcaaccctgacattatccaaagcagattatgagaagcacaaggtttacgcatgcgaggtaacacaccaggggctgagctccccagtaacgaaatcgttcaatcgaggggagtgc

SEQ ID NO: 15268 - DNA, 711 bp, synthetic construct
  misc_feature 1..711: note = source = /note="Description of Artificial Sequence: Synthetic coding sequence"
  source 1..711: mol_type = other DNA
atggctgtcatggctccacggaccctcgttctactgctgtccggcgcgctcgctcttacccagacttgggccgatatccagatgacacagagcccaagcaccctgagtgcctctgtcggcgacagggttaccatcacatgcaagtgccagttgtctgtgggatacatgcactggtaccagcagaaacccgggaaggctccaaagcttctgatctacgacacctcaaaacttgccagtggcgttccctcgcggttttctggcagcggatcaggaactgaattcaccctcaccatttcctcgctgcagccagacgactttgccacttactattgctttcagggaagcggctacccatttactttcggaggaggcaccaaactggagatcaaacgcacagtagccgccccaagtgttttcatcttccccccatctgatgaacagctgaaatcgggcacggcatccgtagtgtgtctcctaaacaacttttacccaagggaggctaaggtccagtggaaggtggataacgcccttcagtcagggaactctcaagaaagtgttacggaacaggacagtaaagattctacctacagcctgagcagcaccctgactttgtctaaggctgattacgagaagcacaaggtttacgcatgtgaagtgacacaccagggcctgagctcaccggtgaccaaatctttcaaccggggcgaatgc

SEQ ID NO: 15269 - DNA, 711 bp, synthetic construct
  misc_feature 1..711: note = source = /note="Description of Artificial Sequence: Synthetic coding sequence"
  source 1..711: mol_type = other DNA
atggccgtgatggctcccaggactttggtcctcttgttaagtggcgcccttgctctgacccagacctgggccgacattcagatgacacagtccccgtctacactttcagcgtccgttggagaccgcgtcacgatcacttgtaagtgtcaattgagcgtggggtatatgcactggtaccagcagaagcctgggaaagcacctaagttgcttatctacgacacatctaagctggcctcaggagtcccctcccggttttcagggtcgggaagcggcaccgagttcacactgaccatatcctcccttcagccggacgactttgccacctattactgctttcagggaagcggctatccttttacattcggaggcggcaccaagcttgaaatcaagcgcaccgtcgctgcgcccagtgtatttatattcccgccctctgatgagcagctgaagtctggaaccgcatctgtggtctgtctgctcaataatttctatcccagggaagcaaaggtacagtggaaagtcgataacgccttacagtcaggcaacagccaagagtccgtgacggagcaggattctaaagacagtacttattccctctccagcaccctcacgttgtcgaaagctgactatgagaagcataaagtatatgcctgtgaagtaacacaccagggactgtcctccccagtcactaaatcatttaacagaggcgagtgc

SEQ ID NO: 15270 - DNA, 711 bp, synthetic construct
  misc_feature 1..711: note = source = /note="Description of Artificial Sequence: Synthetic coding sequence"
  source 1..711: mol_type = other DNA
atggcagtcatggcgccaagaacccttgtcctgctgctgtcgggagcactggcattgactcagacctgggcagacatccagatgacccagtcaccttcgaccctctcggcctccgtcggtgatagggtcactatcacctgtaaatgtcagctttcagtgggctacatgcactggtaccaacaaaaaccgggcaaggctccaaagctgctcatatacgatacctcgaagctcgcatcaggtgtcccttcgaggttttccggaagcggatccgggaccgaattcaccctgaccatctcgtcactccagcccgatgactttgcaacctactactgttttcaaggaagcggatacccatttacctttggaggaggaactaagttggagattaagcgaaccgtggcagcgccttcggttttcatcttccctcctagcgatgagcaacttaagtcggggactgcatccgtggtttgtcttttgaacaacttttatcctcgggaagctaaggtgcaatggaaagtcgataatgcactgcaaagcggaaactcccaggaatcagtgacggaacaggactccaaagattccacgtactcactgtccagcactttgactctttccaaagccgattacgaaaaacacaaagtgtatgcatgtgaagtgacccaccagggcctgagcagccccgtgacgaaatccttcaaccggggagagtgc

SEQ ID NO: 15271 - DNA, 711 bp, synthetic construct
  misc_feature 1..711: note = source = /note="Description of Artificial Sequence: Synthetic coding sequence"
  source 1..711: mol_type = other DNA
atggccgtgatggctcctcgcaccctcgttttgcttctgtctggggctcttgccttgactcaaacctgggctgatatacagatgacccagtctccctctaccctatctgcaagtgttggtgaccgcgtcacaatcacgtgcaagtgtcagttgtctgtggggtatatgcattggtaccagcagaaaccaggaaaggctccaaaactcctcatctacgacacctccaagttggcctcaggggtgccgagtcgtttcagtgggagcggttctgggaccgagttcactctgacaatcagtagcttgcaaccagacgatttcgcaacttactactgttttcaggggagcgggtacccattcacgttcggcggcggaactaagctggagattaagagaaccgtggccgcccctagtgtttttatcttccccccatcagatgaacagttaaagtccgggaccgcaagcgtggtttgcctacttaataacttttatccgcgggaggctaaggtccagtggaaagtggacaatgctttgcagagcggcaacagccaagagtcagtgactgaacaggattcgaaggattcaacttactccctttcttccactcttaccctgtcgaaggccgactatgagaagcataaagtctatgcatgcgaggttacccaccaaggactttcctctccagtgaccaagtccttcaataggggcgaatgc

SEQ ID NO: 15272 - DNA, 711 bp, synthetic construct
  misc_feature 1..711: note = source = /note="Description of Artificial Sequence: Synthetic coding sequence"
  source 1..711: mol_type = other DNA
atggcagttatggctccaagaacacttgttttattattaagtggagctcttgcattaacccaaacttgggcagatattcaaatgacacaatcaccaagtacattatctgcatctgttggagacagagttaccattacctgtaaatgccaattaagtgttggttatatgcattggtatcaacaaaaaccaggtaaggctccaaaattattaatttatgatacatctaagttagcttcaggagttccatctagattttcaggatcaggttcaggtactgaatttacattaacaatttcatcattacaaccagatgatttcgcaacatattattgttttcaaggtagtggataccctttcactttcggaggaggaacaaagttggaaataaaacgaactgtcgctgctccatcagtattcatttttccaccatcagatgaacaacttaaatcaggaacagcttcagttgtttgtttgcttaataatttttatcctagagaagctaaagtacaatggaaagtggataatgcattgcaaagtgggaattcacaagaatctgttacagaacaagattcaaaagattcaacatattctcttagtagtacattaacattaagtaaagctgattacgaaaaacataaagtttatgcatgtgaagtaactcatcaaggactttcaagtccagttacaaaatcatttaatagaggtgaatgt

SEQ ID NO: 15273 - DNA, 711 bp, synthetic construct
  misc_feature 1..711: note = source = /note="Description of Artificial Sequence: Synthetic coding sequence"
  source 1..711: mol_type = other DNA
atggccgtgatggcacctaggaccctggtcctgctgctttccggtgcacttgcactgacccagacttgggcagatatccaaatgactcagtcccctagcactctttcggcatcggtcggagacagagtgaccataacttgcaagtgtcaactgtcagtgggatacatgcactggtaccagcaaaagcccggaaaggcccctaaacttctgatttacgatacgtcgaagctggcatcaggcgtgccttcacgcttttcaggttcgggatcggggaccgagtttactcttaccatatcctcactccaaccggatgacttcgcaacgtattactgttttcaagggtcaggctaccctttcaccttcggcggaggtaccaaactggagattaagcgcacggtggccgcaccatcggtgtttatcttcccaccttcggatgaacagctgaagtccggaaccgcatccgtggtctgtctgctcaataacttttaccctcgggaagctaaggtccagtggaaagtcgacaacgcgctgcaatcaggtaacagccaagagtcagtgaccgagcaggattctaaggatagcacctactcgctcagctcgactcttaccctttcaaaggcagactacgagaaacataaggtctacgcatgtgaggtgacccaccaaggtttgtcgtcacctgttactaaatcatttaacagaggcgagtgc

SEQ ID NO: 15274 - DNA, 711 bp, synthetic construct
  misc_feature 1..711: note = source = /note="Description of Artificial Sequence: Synthetic coding sequence"
  source 1..711: mol_type = other DNA
atggcggtgatggccccgcggacgctcgtcctgctgctcagcggagccctggccctcactcaaacctgggctgatatccaaatgactcagtcgccgagcactttgtcagcctctgtgggtgatcgagtcactattacgtgcaagtgtcagctgagcgtcggatatatgcactggtaccagcagaaaccaggtaaggcacccaaattgctgatctacgatactagcaaactggcatcgggagtccctagcagattcagcggatccggcagcggcaccgagttcactctcactatctcgtcactgcagccggacgacttcgccacgtactactgctttcagggatctggctacccgttcaccttcggaggaggtaccaagctggagatcaagaggactgtcgcggccccctccgtgtttatcttcccgccctccgatgaacaattgaagtccgggaccgcgagcgtggtgtgcctgttgaataacttttaccctcgtgaggctaaagtgcagtggaaggtggacaatgccctccaatcaggaaacagtcaggaatcggtcactgagcaggactcgaaagactcgacctactcattgtcgtccactcttaccctttccaaggcagactacgaaaagcataaggtttacgcgtgcgaagtaacccaccaaggcttgtccagcccggtgaccaagtcgttcaaccgcggggagtgt

SEQ ID NO: 15275 - DNA, 711 bp, synthetic construct
  misc_feature 1..711: note = source = /note="Description of Artificial Sequence: Synthetic coding sequence"
  source 1..711: mol_type = other DNA
atggccgtgatggccccgcgcacccttgtgctgctcctgtccggggcgctggcgctgacccaaacttgggccgacatacagatgactcagagcccgagcacgctctctgcatcggtcggcgatcgggtcactattacctgcaagtgtcagctttcagtgggatatatgcactggtaccaacagaaaccgggaaaagcgcctaagctgttgatctatgacacgtcgaagctggcaagcggagtgccttcccgctttagcgggtcaggatcggggactgaattcacccttactatttcgtcccttcaaccagatgattttgccacttactactgcttccaggggagcggttacccattcactttcggaggtgggactaaactggagatcaagagaaccgtcgctgcaccttcggtgttcatcttcccaccatcggatgagcagctcaaatccggaaccgcgtccgtcgtctgcttgttgaacaatttctacccgcgcgaagcaaaagtgcaatggaaggtggataatgcgctccaatccggcaattctcaggagagcgtgaccgaacaagactcaaaggacagcacttactccctgtcatccaccctcactctctcgaaggcggattacgaaaagcacaaagtgtacgcctgcgaagtcacccatcagggacttagctcaccggtaaccaagtcgttcaaccgaggagagtgc

SEQ ID NO: 15276 - DNA, 711 bp, synthetic construct
  misc_feature 1..711: note = source = /note="Description of Artificial Sequence: Synthetic coding sequence"
  source 1..711: mol_type = other DNA
atggctgtcatggcacctaggaccctcgttctgttgttgagtggcgccctggccttgacacagacatgggctgatatccaaatgacccagtccccttctactcttagcgcttccgtgggcgaccgtgtaactatcacctgtaagtgtcagttgagtgtcggctatatgcactggtaccagcagaaacctggaaaggctcctaagctgctgatttacgacactagtaagttggctagcggagttccctccagattctcaggaagcggttcaggcacagaattcacccttacaatcagttccctccagcctgatgacttcgcaacctattactgttttcagggatctggatatccatttaccttcggcggcggaaccaagttggaaattaaaaggaccgtcgcagccccatcagtgtttatctttcccccttccgacgaacagttgaagtcaggtactgcttccgtggtctgtttgctgaacaacttttaccctcgtgaggccaaggtgcagtggaaggtagacaatgcccttcagtcaggcaactcacaggagagcgtaacagaacaggattccaaggactctacatactccctgtctagcactctgactctctccaaggctgattatgagaagcataaggtatacgcatgcgaggttacccaccaaggtctctcttcccccgtgaccaagagttttaataggggcgaatgc

SEQ ID NO: 15277 - DNA, 711 bp, synthetic construct
  misc_feature 1..711: note = source = /note="Description of Artificial Sequence: Synthetic coding sequence"
  source 1..711: mol_type = other DNA
atggcagtgatggcccctcgcaccttggtcctgcttctgtccggagcgcttgccctgactcaaacgtgggccgatatccagatgacccagtcgccgtcgaccctgtccgcgtccgttggcgaccgggtcaccattacttgcaagtgccagttgtcggttggctacatgcattggtatcagcagaagccggggaaggcaccgaagctcctcatctacgacacctccaagctcgcaagcggagtgccatccagattctcggggagcggttcgggaactgaattcaccctcactatttcaagcctccagccggatgactttgccacctactactgcttccaaggttcaggttaccctttcactttcggcggcgggaccaaacttgagatcaagcgtaccgtggcagctccttctgtgttcatctttccgccgtccgatgaacaactgaagtcgggcaccgccagcgtggtttgtctcctgaacaatttctacccgcgcgaagccaaggtgcagtggaaagtcgacaacgcgctgcaatcaggaaacagccaggaatcggtcactgagcaagactcgaaagacagcacctattcactttcctctacgctgaccctgagcaaggctgattacgaaaaacacaaggtgtacgcttgcgaggtcactcatcagggcttgtcgtcgcccgtgaccaaatcatttaacagaggggagtgt

SEQ ID NO: 15278 - DNA, 711 bp, synthetic construct
  misc_feature 1..711: note = source = /note="Description of Artificial Sequence: Synthetic coding sequence"
  source 1..711: mol_type = other DNA
atggcagtcatggcccctcggacgcttgtgctgctgctctcgggcgcgcttgcattgactcagacctgggccgacatacaaatgacccagtccccgtctacgctgagcgcatccgtgggagacagagtcacgataacctgtaagtgtcaactgtccgtggggtacatgcactggtaccaacagaaacctggcaaagcacccaaacttctgatttacgataccagcaagctggcatcaggagtgccatcgcgcttttccggctccggttcggggactgaatttactctcacgatctctagcctgcaaccagacgacttcgcgacctattactgctttcagggatcgggttacccctttacctttggaggaggaaccaaactggagatcaagcgcaccgttgcagcgccatccgtgttcatttttcctccttccgacgaacaactgaaatccggaactgcatcggtggtctgtctccttaacaacttttaccccagggaggcaaaggttcagtggaaggtggataatgcacttcaatcgggtaactcccaggaatccgtgactgaacaagacagcaaggactccacctactcgctgtcctccacgctcactcttagcaaggccgactacgagaagcataaagtgtatgcatgcgaagtgacgcatcaaggcctttcgtcccctgtgactaagtcgttcaatcgtggtgaatgc

SEQ ID NO: 15279 - DNA, 711 bp, synthetic construct
  misc_feature 1..711: note = source = /note="Description of Artificial Sequence: Synthetic coding sequence"
  source 1..711: mol_type = other DNA
atggcagtcatggctccccgaacgctggtgctcctgttgtccggcgccctcgcgttgacccagacctgggctgatatccaaatgactcaaagcccatctacattgtccgcctcggttggagaccgagttacaatcacctgtaaatgccagctgtctgttggctatatgcactggtaccaacagaagcccggaaaagctcctaagctgctgatttatgacactagcaagctcgcctccggagtgcctagccgattttccgggagtggaagcggaacggagtttaccctcactatctcttccctgcaacccgatgatttcgcaacctactattgctttcaaggttcaggatacccgtttactttcggcggtggcacaaaacttgaaatcaaaaggactgttgccgccccatccgtgttcatcttccccccgtctgatgagcaactgaaatccggcacagcctccgtcgtatgccttctcaataatttctacccaagggaggccaaggtgcagtggaaggtggacaacgctctacagagcggcaactctcaggagtcggtgactgaacaggatagcaaggactcaacatacagtttgagcagtacgttgactctctcaaaggcagactacgaaaagcacaaagtctatgcttgtgaagtgacacaccaagggctgtctagcccggttacaaaaagctttaacagaggcgaatgc

SEQ ID NO: 15280 - DNA, 711 bp, synthetic construct
  misc_feature 1..711: note = source = /note="Description of Artificial Sequence: Synthetic coding sequence"
  source 1..711: mol_type = other DNA
atggcagtgatggcaccacggacgctggtcctgctgttgtcgggcgcactggcgctcactcagacctgggccgacatccaaatgacccagagtccaagcacgctgtcggcttcggtgggagatcgggtcaccatcacctgtaagtgtcagctgtccgtggggtacatgcactggtaccagcagaagccaggcaaagctcccaagctgctcatttacgacacctcaaagctggcgtcgggagtcccctccagattctcaggatccggcagcggcaccgaattcacccttaccatcagctcgctgcagccagatgacttcgctacctactactgcttccagggatccggatacccgtttactttcgggggcggaaccaaactcgaaatcaagcgcaccgtggctgccccttccgtgttcatttttccgccgagcgacgagcagctcaagtcgggaactgctagcgtcgtgtgcctgctgaataacttctaccctcgggaggccaaggtgcagtggaaagtcgacaatgctctccaaagcggcaattcacaggaatccgtgactgagcaagactcaaaggactccacctactccctttcttcgactctgaccctgtcgaaggcagactacgaaaaacacaaggtgtacgcctgcgaagtgactcatcaaggcctgtcgtccccagtcactaaatcctttaacaggggcgaatgc

SEQ ID NO: 15281 - DNA, 711 bp, synthetic construct
  misc_feature 1..711: note = source = /note="Description of Artificial Sequence: Synthetic coding sequence"
  source 1..711: mol_type = other DNA
atggctgtgatggctccgcggacccttgtgctgctcctctcaggcgcactggccctgacgcaaacctgggcggatattcagatgactcagtcgccgtccaccctgtcggcctccgtaggcgatcgcgtgaccatcacctgtaagtgccaactctccgtcggatatatgcactggtaccagcaaaaaccaggcaaggcaccgaaactgctgatctacgatacttcgaagctggcctcgggggtgccgtcgagattttcgggttcagggtcaggaactgagttcactctgaccatctcgtccctgcagccggatgacttcgccacttactactgcttccagggaagcggatacccttttactttcggaggaggtactaagctggagatcaagcgcaccgtggccgcaccgagcgttttcatttttccgccatcggatgaacaactgaaatccggcaccgcaagcgtggtgtgcctccttaacaacttttatccgcgggaggcgaaagtgcaatggaaagttgacaacgcattgcagagcggaaactctcaggaatccgtcaccgaacaagactcgaaagactccacgtacagcctgagctcaacgctcacgctcagcaaggcggactacgaaaagcacaaggtgtacgcctgcgaggttacccatcagggcctttcttcgccggtgaccaaatctttcaaccggggagagtgc

SEQ ID NO: 15282 - DNA, 711 bp, synthetic construct
  misc_feature 1..711: note = source = /note="Description of Artificial Sequence: Synthetic coding sequence"
  source 1..711: mol_type = other DNA
atggctgttatggctccacgtaccctggttttgctgttaagcggcgcactggcattaacccagacctgggccgatatccagatgacacaatccccatccactctgtccgcctcagtcggcgaccgggttactatcacctgcaagtgtcaactgtccgtgggctatatgcactggtatcaacagaaacctggcaaagcccccaagttactcatttatgatacatcaaaactcgctagtggcgtgcctagccgttttagtgggtctggcagcggcactgaattcacactaactatatcttctctacagccagacgatttcgctacatattactgctttcaggggtccggatatcctttcacttttgggggtggtactaagctcgaaataaagagaacagtggccgctccatccgtgtttatattccctcccagcgacgaacaattaaagtctgggactgcttctgtggtctgcctattaaacaacttctacccaagggaggctaaggtgcagtggaaggtcgacaatgccctccagagcggcaacagccaggagagcgttacagagcaggattccaaagattctacatacagtttatctagtactctgaccctgtcaaaagccgactatgaaaagcacaaagtatacgcttgtgaagtgacacaccagggattgtccagtcctgtgaccaaatcttttaaccgaggggagtgt

SEQ ID NO: 15283 - DNA, 711 bp, synthetic construct
  misc_feature 1..711: note = source = /note="Description of Artificial Sequence: Synthetic coding sequence"
  source 1..711: mol_type = other DNA
atggcggtgatggcaccaagaaccctcgtcttgctgctgtccggggcgcttgccctcactcaaacctgggcggatattcagatgacccagtccccgtcaactctgtcggcatcggtgggagatcgggtgaccatcacgtgcaaatgtcagctcagcgtgggctacatgcactggtaccaacagaagccagggaaggcgcctaagttgctgatctacgacacctcaaaactggcctcgggggtcccgtcaaggttctcgggatccggatcggggaccgagttcaccctcactatctccagcctccagccggacgacttcgcaacctactattgcttccaaggctcaggatacccctttacttttgggggaggaactaagctggagatcaagcggactgtcgcagccccatccgtgttcatcttcccaccctccgatgaacagctgaagagcggaactgcatcggtggtctgccttctgaacaacttctaccctcgggaggccaaggttcaatggaaagtggacaacgcactgcaatccggcaattcccaagaatccgtgaccgaacaagactccaaggattcgacctactcactgtcgtccacgctcaccctgtcgaaggctgactacgaaaagcataaggtgtacgcatgcgaagtcacccaccagggcctttcgtccccggtgactaagagcttcaacagaggagagtgc

SEQ ID NO: 15284 - DNA, 711 bp, synthetic construct
  misc_feature 1..711: note = source = /note="Description of Artificial Sequence: Synthetic coding sequence"
  source 1..711: mol_type = other DNA
atggcggtgatggcgccacggacattggtgctgctgctgtccggagctctggcattgactcaaacctgggccgacattcaaatgacccagtctccctccacactttcggcctccgtcggggatagggtcacgatcacttgcaagtgtcaactctctgtgggatatatgcactggtatcagcagaagccagggaaagccccgaaacttcttatctacgatacctccaagctggcgtctggagttccgtcacgcttctccggaagtggctccggcaccgaattcaccctgactattagctccctccagccagacgacttcgctacatactattgtttccagggatcagggtaccctttcacgttcggggggggcactaaactggaaatcaaacggacggtggccgccccatcagtgttcatctttccaccgtccgacgagcagcttaaatccggaacagcgagcgttgtatgtttacttaataatttctatccgagggaagccaaggttcagtggaaggtcgacaacgccctccaatccggcaactcacaggaatccgttacagaacaagatagcaaggactcaacctattccttatcaagtaccttgaccttgagtaaagccgactacgagaaacacaaggtttatgcctgtgaagtgactcatcaaggcctctcctcaccagtcaccaagagtttcaacagaggagaatgc

SEQ ID NO: 15285 - DNA, 711 bp, synthetic construct
  misc_feature 1..711: note = source = /note="Description of Artificial Sequence: Synthetic coding sequence"
  source 1..711: mol_type = other DNA
atggcagtcatggcaccccggaccctagtgctgctccttagtggagctctggcactcacacagacttgggctgacatacagatgacgcagagtcccagcaccctgtccgccagcgtcggcgatcgcgtcactatcacctgcaagtgtcagttgtccgtaggatatatgcactggtaccagcagaagcccggaaaggcccccaagttactgatttacgacacgagcaagctggcgtccggggtgccatccagattctccggttccggttctggcacggagtttacgctgacgatttcgtccctccaacctgacgacttcgccacctactattgtttccagggatccggctatcctttcactttcgggggcggaacaaagctcgagatcaagcggactgtggcagcgccttcagttttcatctttccaccatccgacgagcaacttaagagtggcacagccagtgtggtatgcctgctgaataatttctatccccgcgaggccaaggttcagtggaaagtggacaacgcactgcagtctggtaactcccaagaatctgtgacagaacaggatagtaaagactccacttatagcctcagctctactctgactctttccaaggccgattacgagaagcacaaggtttatgcctgcgaggtgacccaccagggactctccagtcctgtcacaaaatccttcaaccggggggagtgc

SEQ ID NO: 15286 - DNA, 711 bp, synthetic construct
  misc_feature 1..711: note = source = /note="Description of Artificial Sequence: Synthetic coding sequence"
  source 1..711: mol_type = other DNA
atggcagtcatggcaccccggacactagtccttcttctctccggagctctagcactcactcagacatgggcagatatccagatgacacagtctccctccacactgtctgcctccgtaggagatagggtgacaataacatgcaaatgtcagttaagtgtagggtatatgcattggtatcagcagaagcctgggaaagcacctaaactcctcatctacgatacaagtaaattagcctctggagttccctcgcgctttagtgggagtgggtccgggacagagtttactctcacaatctcgtcgctgcagcctgatgattttgcaacttattattgcttccagggatccggatatccattcacatttgggggaggaactaaactagaaattaaaagaactgtggcagctccctccgtcttcatctttcctccatccgatgaacagctaaaatccggaactgcctctgtggtgtgtttgctgaataacttctaccctagagaagccaaagtgcagtggaaggtggataacgctcttcagtcagggaattctcaggaatcagtgactgaacaggatagtaaagactccacatatagtcttagtagtacactcacattatcaaaggcagattatgagaagcataaagtctatgcctgcgaagtgacacatcagggattatcaagtcccgtcacaaaatcattcaatcggggggagtgt

SEQ ID NO: 15287 - DNA, 711 bp, synthetic construct
  misc_feature 1..711: note = source = /note="Description of Artificial Sequence: Synthetic coding sequence"
  source 1..711: mol_type = other DNA
atggctgtcatggcacctagaacgttggttctgctgctctctggcgcgctcgccctgacccagacttgggccgacatccagatgacgcagtcgcccagcaccctgtccgcttcagtgggggatcgagtaaccatcacctgtaagtgccagctttccgtgggctacatgcattggtaccagcaaaagccaggaaaagctcccaagctccttatttatgacactagtaaactggcatcgggcgttcccagtagattctccggctcaggcagtgggacagaatttacactgacgatcagttcgctgcagccagacgatttcgccacctactactgtttccaagggagtgggtaccctttcaccttcggcggcgggacgaagctcgaaattaaaagaaccgtagccgcacctagcgtttttatctttccaccctccgacgagcagttgaaatctggaactgccagtgttgtttgtttgttaaacaacttctatcctcgggaggcgaaggtacaatggaaagtggataatgccctgcagagcgggaattcccaggaatctgttactgagcaggattctaaggattccacctactccctgtcttccaccctgacactcagtaaagcagactatgaaaagcacaaggtctatgcatgcgaagttacccaccagggcttatcctccccagtgacgaaaagcttcaatcgtggggaatgc

SEQ ID NO: 15288 - DNA, 711 bp, synthetic construct
  misc_feature 1..711: note = source = /note="Description of Artificial Sequence: Synthetic coding sequence"
  source 1..711: mol_type = other DNA
atggccgttatggcaccccgtaccttagtgctgctcttgagcggtgctttggccctaacccaaacttgggctgatattcagatgacccagagtcctagcacccttagcgcctctgtaggagatcgtgttactatcacctgcaaatgccagctttctgtgggctacatgcattggtatcaacagaagcccggaaaagcacccaagctgcttatttacgacacctcaaaactggccagcggagtcccatctcgcttttccggctctggttcgggcaccgaatttaccttgaccatctcaagccttcaaccagatgatttcgctacttactattgctttcaaggctcaggataccctttcacattcgggggtggtaccaagctggagatcaaaaggacagtggcagcacccagcgtttttatatttcccccttcggatgagcaacttaagagcggcacagctagtgtagtgtgccttcttaacaacttctaccctagggaggccaaggtccagtggaaggtggataacgcacttcaaagcggcaatagccaagagtccgtcacagagcaggacagcaaggatagtacatacagcctctcctcaacccttacattatccaaggccgactacgagaaacacaaggtctacgcctgtgaggtcacccaccaggggctctcatcgccggtgaccaagtcattcaaccgtggagaatgc

SEQ ID NO: 15289 - DNA, 711 bp, synthetic construct
  misc_feature 1..711: note = source = /note="Description of Artificial Sequence: Synthetic coding sequence"
  source 1..711: mol_type = other DNA
atggcagtgatggctccccgcacccttgtgctcctgctctcgggtgccctggcgcttacccagacttgggcagacatccagatgactcagagcccatcgacgctgtcagcctcagtcggagatagggtgactattacgtgcaagtgccagctctcagtgggatacatgcattggtaccaacaaaagccaggtaaggcacccaaactgttgatttacgatacctcaaaacttgcatcgggtgtgccttcacggttttcgggttcagggagcgggactgaatttacccttactatttcgagccttcaaccagatgacttcgccacttactactgttttcaaggttccggatatccattcacttttgggggtggcaccaagctggaaatcaagcgcactgtggccgcacctagcgtgttcatatttcctccttcggatgaacagctcaagtccggtactgcatcggtggtctgtctgctgaacaacttctaccctagagaagctaaggtccaatggaaagtggataacgcactgcaatcgggtaacagccaggagtcggtgaccgaacaggatagcaaggactcgacttactccctttcgtcaactctcaccctttccaaagcggactacgagaagcataaggtgtacgcatgtgaagtgacccatcaaggactttcctcaccagtgaccaaatcgtttaatcgaggggagtgc

SEQ ID NO: 15290 - DNA, 711 bp, synthetic construct
  misc_feature 1..711: note = source = /note="Description of Artificial Sequence: Synthetic coding sequence"
  source 1..711: mol_type = other DNA
atggccgttatggctccacggactcttgtgctgctgctctccggagcactggcattgacccagacttgggccgatatccagatgacacagtcaccctcaacgctgagcgcaagtgtaggcgatagggtcaccatcacatgtaagtgtcagctctctgttggttatatgcattggtaccagcagaaacccggaaaggctccaaagctcctaatctacgatacatccaaactcgcgtcaggtgtcccgagccggttcagcggtagtggatccggaaccgaattcacgctgaccataagctcattgcagccagacgactttgcaacctactactgcttccaaggcagtggctatcctttcacgttcggcggcggtacaaaactggaaattaagagaaccgtcgcagctcctagcgtgtttattttcccaccctcagacgagcagctcaaatcagggactgcttccgtagtttgcctcctgaacaacttttacccacgcgaggccaaagtgcagtggaaggtggataatgccctgcaatcaggaaactctcaagaatcagtgacagagcaggattcaaaagatagtacttactcactgtcctccaccctgaccctgtcaaaagccgattatgaaaagcataaggtatacgcctgcgaagtcacccatcagggactgtcgtcacctgtcacgaaaagctttaaccggggggaatgt

SEQ ID NO: 15291 - DNA, 711 bp, synthetic construct
  misc_feature 1..711: note = source = /note="Description of Artificial Sequence: Synthetic coding sequence"
  source 1..711: mol_type = other DNA
atggccgtcatggcaccaagaactctcgtgcttctgctctccggtgctctcgcgcttactcagacttgggcggatattcaaatgacccaatcaccttccacgctgtcggcgagcgtgggagacagagtcaccatcacttgtaagtgccagctttccgtcggttacatgcactggtaccagcaaaaaccgggaaaggcccccaagctgttgatctatgatactagcaagctcgcctccggcgtgccgtcccgctttagcggatctggaagcggaaccgagttcactcttactatttcttcgttgcagccagacgattttgcgacgtactactgctttcagggctccggatacccgttcactttcgggggtggcactaagctggaaatcaagagaactgtggctgcccctagcgtgttcatcttcccaccgagcgatgagcagctgaagtccggcaccgcttcggttgtgtgcctgctgaataacttctaccctagagaggccaaagtccagtggaaggtggacaacgctctgcagtcgggtaattcccaggagtcggttaccgaacaggacagcaaagattcaacctattccctgagcagcactctgaccctgtccaaggcagactacgaaaagcacaaagtctacgcgtgtgaggtgacccaccagggattgagctcaccagtaacgaagtccttcaataggggggaatgc

SEQ ID NO: 15292 - DNA, 711 bp, synthetic construct
  misc_feature 1..711: note = source = /note="Description of Artificial Sequence: Synthetic coding sequence"
  source 1..711: mol_type = other DNA
atggcagtgatggccccgcgcaccctcgtccttctgttgtcaggagctctggcactgacccagacgtgggcggatatccagatgactcagtccccttcgactctcagcgcatcagtgggggatcgagtgaccatcacctgcaagtgtcagctttcagtgggctacatgcattggtaccaacagaagccgggcaaggctccgaagctcctgatctacgacacctccaaactggcgtccggcgtgccatcccgcttctccggcagcggttcgggcactgaattcacgttgactattagctccctgcaacccgacgactttgctacctactattgcttccaaggctccggatacccttttaccttcggcggagggacgaagctggaaatcaagcgcactgtcgcggccccttccgtgttcatcttcccgccgtcggacgagcagctcaagtccggaaccgcctctgtggtctgtctcctgaacaacttctacccgcgcgaggcaaaggttcagtggaaggtggacaatgcgcttcaatcgggtaactcacaggaatcggtgactgagcaggacagcaaagatagcacttacagcctctcaagcactctgaccctgtctaaagcggattacgagaagcacaaagtgtacgcatgcgaggtgacccaccagggactgtcaagccccgttacgaaatcattcaatcgcggggaatgc

SEQ ID NO: 15293 - DNA, 711 bp, synthetic construct
  misc_feature 1..711: note = source = /note="Description of Artificial Sequence: Synthetic coding sequence"
  source 1..711: mol_type = other DNA
atggccgtgatggcaccacggaccctggtgcttctcctgtcgggagcactggcactcactcaaacctgggcggatatccaaatgacgcagtcaccgtcgaccctgagcgcatcggtcggcgatagagtgactataacctgcaagtgccaactgagcgtcggatacatgcactggtaccaacaaaagcctggtaaggcaccgaaacttttgatatacgatacttcgaaacttgcatcaggagtgccttcgcgcttctccggatcgggaagcggtactgaattcactctcaccatttcgtcactgcaacccgacgattttgcaacttactactgttttcagggctccggctacccttttaccttcggtggaggcaccaagctggagattaagcggactgtggccgcaccttcggtattcatatttcccccgtcggacgagcagcttaagtccggcactgcatcggttgtttgcttgcttaacaacttctatccaagagaagcgaaagtacagtggaaggtggacaatgcgctgcaaagcgggaattcacaagaatcagtgaccgagcaggactcgaaggactccacctactcactgagcagcacgcttacgcttagcaaggctgattacgagaaacacaaagtctacgcctgtgaggtgacccatcagggtctttccagcccggtgaccaagtcatttaaccgcggcgaatgt

SEQ ID NO: 15294 - DNA, 711 bp, synthetic construct
  misc_feature 1..711: note = source = /note="Description of Artificial Sequence: Synthetic coding sequence"
  source 1..711: mol_type = other DNA
atggcggtgatggcaccaaggaccctggttctgctgctgtctggcgcacttgccctgacgcagacttgggcagacattcaaatgacccaaagcccctccactctttccgcatcagtcggagatcgtgtcaccattacgtgtaaatgtcagctcagcgttgggtacatgcattggtaccaacagaagcccggaaaagcccctaagttgctgatctacgatacctccaaactggcgtccggcgtcccctcaagattttcgggttcgggaagcggtaccgaatttaccctcaccattagctccctccagcctgacgatttcgccacgtactattgctttcaaggttcgggttaccccttcacttttggaggaggtactaagctggaaatcaagagaactgtggcagcaccaagcgttttcatctttccaccttcagatgaacagcttaagtccggcaccgcatcggttgtgtgccttctgaacaacttttaccctagagaggccaaggtccaatggaaggtggataatgcgctccaatcgggaaattcacaagagtccgtgacggaacaggattccaaagactcgacctactctctttcatccactctgactctgagcaaggctgactacgaaaagcacaaagtgtacgcatgtgaggtgacccatcaaggactctcgtcgccagttactaagtcctttaaccggggcgaatgt

SEQ ID NO: 15295 - DNA, 711 bp, synthetic construct
  misc_feature 1..711: note = source = /note="Description of Artificial Sequence: Synthetic coding sequence"
  source 1..711: mol_type = other DNA
atggctgtgatggcccccagaactctggtgttgctgctctcgggcgccctggcgctgacccaaacttgggcggacatccaaatgacccagtcgccgtcaaccctgtctgcatcagtcggagatcgcgtgactatcacgtgcaaatgccagctctctgtaggatacatgcattggtaccagcagaagccgggaaaggcccctaagctgttgatatacgatacctcaaaacttgcgtccggagtgccctcgcggttctcggggtccggttcagggactgaatttaccctcaccatttccagcctccaaccggacgacttcgcgacctactactgtttccagggctccggttatccgtttaccttcggtggcggaactaagctggaaatcaagaggacggtcgctgcaccgagcgttttcatctttccaccttcagacgaacagctgaagagcggaactgcctcagtggtctgcctgctgaataacttctatccgcgagaggcaaaagtccagtggaaggtggataatgctcttcaatccgggaactcccaggaaagtgtgactgaacaggactccaaggattccacttacagtttgagctccacgcttacccttagcaaggcggattacgagaagcacaaggtgtacgcctgcgaggtgacccaccaaggcctgtcgagtccagtgacgaaatctttcaaccggggtgagtgt

SEQ ID NO: 15296 - DNA, 711 bp, synthetic construct
  misc_feature 1..711: note = source = /note="Description of Artificial Sequence: Synthetic coding sequence"
  source 1..711: mol_type = other DNA
atggccgtaatggcccctcggacgctggtgcttctcctcagcggcgccctggcgctcacgcagacatgggcggacattcagatgacccagtcccccagcacattatcggcctctgtgggcgatcgcgtgactattacatgcaaatgccagctgtccgtgggatatatgcattggtatcagcagaagcccggcaaggctccgaagcttctgatctacgatactagcaaacttgcaagtggtgtgccatccagattctcgggatctgggagcgggacagaattcacacttactatctcctctctgcagcctgacgactttgctacctactactgcttccaggggtctgggtatccctttacctttggcggcgggacaaagctcgaaattaaacggacagtggcagcaccctcagtttttatctttccaccatctgatgagcaacttaagtcgggcactgcttccgtagtctgtctgctgaacaatttctaccctcgtgaagcaaaagtacagtggaaagtagacaatgcgttacaatctggcaattcccaagaaagcgtgactgagcaggactctaaagattctacctattcgttgagctccaccctgacattgagcaaagctgactacgagaaacacaaggtgtatgcatgcgaggtgacccaccaggggctgtcttccccggtaaccaagagcttcaaccggggtgagtgt

SEQ ID NO: 15297 - DNA, 711 bp, synthetic construct
  misc_feature 1..711: note = source = /note="Description of Artificial Sequence: Synthetic coding sequence"
  source 1..711: mol_type = other DNA
atggcagtgatggcccctcgtacacttgttcttctacttagcggcgcactggctttaacccagacatgggcagacatccagatgacgcagtcaccctctacattatccgcaagcgtcggagatagagttactattacatgcaaatgccagctaagcgttggctatatgcattggtaccaacaaaaaccgggaaaagcacctaaattgcttatctacgatacatcaaagcttgcttcgggtgttccgagccggttttcaggctcgggaagtggaacagaatttacactgacaatttcatcattgcagcccgatgattttgcgacatattactgttttcaaggcagtggttatcccttcacatttggcggtggcacaaaacttgaaataaaacgtaccgtggcagctccgtctgtgtttatttttcctccgtctgatgaacaactgaagtcaggaacggcttctgtcgtttgcctgttaaacaacttttacccgcgggaagctaaagtccaatggaaagtggacaacgcgcttcaatccggaaattctcaagagtcagttacggaacaggactccaaggactctacatatagtctgtcgtctacactcactctgtctaaggctgactacgagaaacacaaagtgtatgcgtgtgaagtaacccatcagggactctccagcccagtcactaaaagctttaatcgaggcgaatgc

SEQ ID NO: 15298 - DNA, 711 bp, synthetic construct
  misc_feature 1..711: note = source = /note="Description of Artificial Sequence: Synthetic coding sequence"
  source 1..711: mol_type = other DNA
atggcggttatggcccccaggactcttgtcctccttctgtcgggtgcgctcgccctgactcagacgtgggccgacatccagatgactcagtccccatcaactctgtctgcctccgtgggcgatcgcgtgactatcacctgcaaatgccagctgtcagtgggatacatgcactggtaccagcaaaaacctggcaaggcaccaaaactgctgatctacgacacctcgaagctggcctcgggagtaccgtcccgcttctctggcagcggaagtgggaccgagtttaccctcacgataagctcgcttcagccggacgactttgccacctattactgtttccaaggatcgggataccctttcaccttcggagggggcactaagctcgagattaagagaaccgtggccgccccatcagtgtttatcttcccaccgagcgatgagcaattgaagtccggaactgcgtccgtggtctgcttgctcaacaacttctacccgcgcgaagcaaaagtgcagtggaaagttgataacgctctgcagtctggcaattcccaggagtcagtcaccgaacaggactccaaggactcaacttactccctgtcctccactctcaccctgtccaaggccgactacgaaaagcacaaggtctacgcttgcgaagtcacccatcaaggactttcctcacccgtgactaagtcttttaaccgcggagaatgc

SEQ ID NO: 15299 - DNA, 711 bp, synthetic construct
  misc_feature 1..711: note = source = /note="Description of Artificial Sequence: Synthetic coding sequence"
  source 1..711: mol_type = other DNA
atggctgtgatggcaccccgcacactcgtgctcctgttgtctggcgctctggcactgacacagacctgggctgacattcagatgacacagtctccatcaaccctgtcagcctctgttggcgacagggtgaccattacctgcaaatgtcagctgtctgtgggctatatgcattggtatcaacaaaagcctggcaaagctccgaaacttctcatctacgacacttccaagctggccagtggcgtgccatctcgattctcagggtccgggtccggaactgagttcacactcaccatctcttccttacaaccagatgactttgccacctattactgttttcagggctccgggtacccgttcaccttcggtggaggaactaagctggagattaagcggactgtagcggcccccagcgtgttcatttttcctccttccgacgagcagctaaaaagtgggaccgcgagcgtggtttgtctgctgaacaatttctatcctcgtgaagcaaaggtacagtggaaggtagataacgcccttcaaagtggaaactctcaggaaagtgtgacggagcaggattctaaggacagcacctatagcctgtcatccacgttaacgctgtcaaaagcagactatgaaaagcataaggtctacgcctgtgaggttacccatcaaggtctgagctcccccgttacaaaatctttcaatcgaggagagtgt

SEQ ID NO: 15300 - DNA, 711 bp, synthetic construct
  misc_feature 1..711: note = source = /note="Description of Artificial Sequence: Synthetic coding sequence"
  source 1..711: mol_type = other DNA
atggcggttatggcgccgcgaaccttggtattgctgttgagcggtgctctggcattaacccaaacctgggcggatattcagatgactcagtctccatcgactctttcagcctccgtcggtgatagagtaaccataacatgcaagtgccagttgagtgtcgggtacatgcattggtatcagcagaagcccgggaaggctccaaaactccttatctacgatacgtctaagctggcatccggagttccctctaggttctcgggtagtgggagcggaacagagttcaccttaactatttcttccctgcagcccgatgactttgctacgtactattgtttccaagggtccggctacccgttcacctttggaggcggtactaagttggaaattaagcgtactgtggctgctccctctgtgttcatctttccgccttccgacgagcaacttaagagtggcaccgcatccgttgtttgtttgctgaacaacttttatcccagagaggccaaggttcagtggaaggtggataacgcgctacaatccggaaattcacaggagtccgtcacggaacaagacagtaaggattcgacctacagcttaagttccacattgactctatccaaggccgactacgagaagcacaaggtatacgcttgcgaggtcactcaccaggggctgtcttctccggtgaccaagtcgttcaaccgtggagagtgc

SEQ ID NO: 15301 - DNA, 711 bp, synthetic construct
  misc_feature 1..711: note = source = /note="Description of Artificial Sequence: Synthetic coding sequence"
  source 1..711: mol_type = other DNA
atggcagttatggcgcccagaacattggtcctcctgctgtcgggcgccctggccctcacacaaacttgggcagacatccagatgactcagagtccttctacactgtcagcctcagtgggtgaccgggtcaccatcacttgcaaatgccaactgagtgtgggctacatgcactggtatcagcagaaacctggtaaggcaccgaagctgttgatttacgatacctctaagctggcctccggggtgcccagccgctttagtgggtctgggagtgggaccgaattcactttgaccatatcctcactgcaacctgatgactttgccacctactactgctttcagggcagtggatatcctttcaccttcgggggaggcacgaaattggagattaaacggaccgttgccgccccaagtgtgtttatcttcccaccttctgatgaacagctgaagagtggcaccgcgtctgtagtatgcctgctaaacaacttttatccacgagaggcgaaagtgcaatggaaagttgacaacgccctccagtcagggaattcccaggaatcggttactgagcaggactccaaagattccacatactctttatcttccacactgacattgagcaaggcagattatgaaaagcataaggtgtatgcttgcgaagtgacgcatcagggcctttcctcccctgtgacaaagtcattcaacaggggggagtgt

SEQ ID NO: 15302 - DNA, 711 bp, synthetic construct
  misc_feature 1..711: note = source = /note="Description of Artificial Sequence: Synthetic coding sequence"
  source 1..711: mol_type = other DNA
atggcggtgatggctccccggactcttgtactcctcctttccggcgcgctggcccttacacagacttgggctgacatccagatgacccaatccccttctactctgagtgcttctgtgggagacagggtgacaatcacttgtaagtgccaactgagcgtgggctatatgcactggtaccagcagaagcccggcaaagcccccaagctgttaatttacgacaccagcaaactggcaagcggggtgccttctagattttcaggctccggatctggcacagaatttacgctgacgatctcaagcctccagcccgacgacttcgctacctactattgcttccaaggatccgggtatccattcaccttcggaggagggactaagctggagatcaaaagaacagtcgctgcaccctccgtgttcatctttccacccagtgacgagcaactgaagagcggaacagcatcagtagtgtgcctacttaataacttctatcccagggaggctaaggtgcagtggaaagtcgacaatgcgctgcagagcggaaactcgcaggaatccgtgaccgaacaggattccaaagattctacatattccctctcatcaacccttaccctaagtaaggctgattacgagaagcataaggtatatgcttgcgaggtgacccatcagggcttgtcatctccagtcactaagtcatttaatagaggcgagtgc

SEQ ID NO: 15303 - DNA, 711 bp, synthetic construct
  misc_feature 1..711: note = source = /note="Description of Artificial Sequence: Synthetic coding sequence"
  source 1..711: mol_type = other DNA
atggcggttatggctccgcgtaccctggtgctgctcctgtcgggcgccctcgccctgacccagacatgggctgacatccaaatgacccaatcgccttctaccctgagcgccagcgttggcgacagggttactattacttgtaagtgccaactgagcgtgggatacatgcactggtaccagcagaagccgggaaaagcacccaaactcctgatctatgacacttctaaactggcctcaggcgtgccctctcggttttctggatctggcagcggaacagagttcactctcaccatctcttctctgcagccagatgacttcgccacgtactactgttttcagggcagtggctatcccttcacctttggaggaggtactaaattggaaatcaagagaacagtcgctgcgccttccgtcttcatcttcccaccctccgatgaacagctaaaaagtgggaccgcctcggtcgtgtgcttgctgaacaatttttaccctagagaagcgaaagttcagtggaaagttgacaacgcactgcagtctggtaatagccaagaaagtgttacggagcaggacagcaaggactccacatactctttaagtagcacgctaaccctgtccaaggccgattacgagaaacacaaagtctacgcttgtgaggtgacccaccagggtctttcctctcccgtgaccaagtcttttaatcgtggcgagtgt

SEQ ID NO: 15304 - DNA, 711 bp, synthetic construct
  misc_feature 1..711: note = source = /note="Description of Artificial Sequence: Synthetic coding sequence"
  source 1..711: mol_type = other DNA
atggccgtgatggcgcctagaactctggtgttgctcctgtccggagcactggcactgacccagacttgggccgacattcaaatgactcaatcaccttcaacgttgtcggcctccgtgggtgaccgcgtgaccatcacctgtaagtgtcagttgtccgtcggatacatgcattggtaccagcagaagccgggaaaggctccaaaactgttgatctatgatacctcgaaactggcaagcggagtgccctcgcgcttctcgggctcgggaagcgggaccgagtttactctgactatctcatccctgcagccggatgatttcgctacgtactactgcttccagggcagcgggtacccctttaccttcggtgggggcaccaagctggagatcaaacgcaccgtggcggccccatccgtgtttatcttcccgccatccgacgagcagctcaaatcgggaactgcctcggtagtgtgcctcctgaacaatttctacccccgcgaagccaaagtgcagtggaaagtcgacaatgcactgcaaagcggaaattcacaggagagtgtcaccgaacaagactctaaggatagcacttactccctctcgagcactctcactctgtcgaaagccgactacgagaagcataaagtctacgcttgcgaggtgactcaccagggtctgagctccccagtcaccaaatcattcaataggggggagtgc

SEQ ID NO: 15305 - DNA, 714 bp, synthetic construct
  misc_feature 1..714: note = source = /note="Description of Artificial Sequence: Synthetic coding sequence"
  source 1..714: mol_type = other DNA
atggcagtgatggcaccacgcacactggtcctcctgctctctggcgccctggccctgacgcaaacatgggccgatattcagatgacccagtctccaagttccttgagtgcatccgtcggggatcgcgtcacgatcacttgtcgggccagtcaggatgtgaatactgcggtcgcatggtatcagcagaagcccggaaaggctccgaaactgctgatttactcagctagttttttgtacagtggtgtgccctcccgtttctctggcagcagatcgggcactgatttcacactgactatttcctccctgcagcctgaggactttgccacatattattgccagcaacattacaccacccctccgacgttcgggcagggaacaaaggttgagatcaagaggaccgtcgccgcaccctctgtctttattttccctcccagtgacgagcaattaaagagtggcacagctagtgttgtgtgcctgttaaataacttttatccacgcgaagccaaagtccaatggaaagtcgacaacgcgctgcagtcaggaaattctcaggagtcagtgactgagcaggactcgaaggattcaacatactccctgagctccactctgaccctgtctaaggctgactatgagaaacacaaagtctatgcgtgtgaagtcactcaccagggattgtcatcccctgttacaaagtcgttcaatcgcggcgagtgt

SEQ ID NO: 15306 - DNA, 714 bp, synthetic construct
  misc_feature 1..714: note = source = /note="Description of Artificial Sequence: Synthetic coding sequence"
  source 1..714: mol_type = other DNA
atggccgttatggctcccagaaccttggtgctgctgctctcaggcgctttagccttgacacagacgtgggctgatattcagatgacccaatctccgtcgtctttatccgcgtcagttggggatcgggtgaccataacatgtagggccagtcaagacgtgaatactgccgttgcttggtaccagcagaagcctgggaaagctccaaaacttttgatttactctgcatctttcttgtatagcggggtgcccagcaggttttccggatctagatccggcaccgacttcactctgacaatcagcagccttcagccagaagattttgcaacatactactgtcagcagcattacactaccccaccgacgtttggtcaagggaccaaggtggagattaaacggactgttgccgccccctccgttttcattttccctccatctgatgaacagcttaagtccgggaccgcgtccgtggtgtgtcttctcaataatttctatcccagggaagcaaaggtgcaatggaaagtggacaacgcacttcaaagcgggaacagtcaggagtctgttacagagcaggactctaaggacagcacgtacagtctatcgagtacactaacgctgtctaaagccgactacgaaaagcataaagtctacgcctgcgaagtgacacaccagggtctgagttctccggtgactaagtccttcaataggggggagtgc

SEQ ID NO: 15307 - DNA, 714 bp, synthetic construct
  misc_feature 1..714: note = source = /note="Description of Artificial Sequence: Synthetic coding sequence"
  source 1..714: mol_type = other DNA
atggcggttatggccccccggaccctcgtgctcctgctgtcgggtgcgctcgcactgactcaaacctgggccgacatacaaatgacccagtcaccttcgagcctctccgcttccgtgggagatcgcgtcaccatcacgtgtcgggcgagccaggatgtgaacactgcagtcgcatggtaccagcagaagccaggcaaggccccgaaactcttgatctatagcgcctccttcctctactccggagtgccgagccggttctccggatcgcgctctggcactgactttaccctgactatttcctcgctgcagccagaggattttgctacctactactgccagcaacactacaccactcctccgacttttggacaaggaaccaaggtggaaatcaagcgcaccgtggcagctccttctgttttcatcttcccgccttccgatgaacagttgaaatcagggacggcttctgtcgtgtgcctcctgaataacttctacccaagagaagccaaagtgcagtggaaggtcgacaacgccctccagtccggaaacagccaagaatcagtgaccgagcaagactcaaaggacagcacgtactctctttcgtccactctgaccctgtcaaaagcagactacgaaaagcacaaggtgtatgcttgtgaggtgacccatcagggtctttcctcgcccgtgactaagtccttcaataggggcgagtgc

SEQ ID NO: 15308 - DNA, 714 bp, synthetic construct
  misc_feature 1..714: note = source = /note="Description of Artificial Sequence: Synthetic coding sequence"
  source 1..714: mol_type = other DNA
atggcagtcatggcccctcggactctcgtgctgctgctgtctggggcactggccctgacgcaaacgtgggcggatatccaaatgacccaatcaccgtcgtccctgtccgcgtccgtcggagatcgcgtgactattacctgccgggcaagccaggacgtgaacactgcagtggcctggtaccagcagaaacctgggaaagcacctaagttgctgatctacagcgcatcattcctgtactctggagtgccatcaagattcagcggatcccggagcggaaccgacttcaccctcaccatctcgtcactgcagccagaggacttcgcgacttactactgtcagcagcattataccactccgccaactttcgggcagggcacgaaggtcgaaatcaaacgcactgtggccgctccgtcagtgttcatctttccaccctcagatgagcagctcaaatcgggaaccgcttccgtggtctgcctgttgaataacttctacccgcgcgaggcgaaagtgcaatggaaagttgacaacgccttgcagtcgggcaattcgcaggaatcggtgactgagcaggactctaaggattcgacctactcgctgtcaagcactctcacgctgtccaaggctgactacgaaaagcacaaggtgtacgcttgtgaggtcacccaccagggactgtcctcgccggtcactaagagcttcaatcgcggagagtgt

SEQ ID NO: 15309 - DNA, 714 bp, synthetic construct
  misc_feature 1..714: note = source = /note="Description of Artificial Sequence: Synthetic coding sequence"
  source 1..714: mol_type = other DNA
atggcagtgatggcaccccgcactctcgtgctgctcctttcaggagcactggctctcacgcaaacttgggcagatattcagatgacccagtcaccttccagcttgtcggcttcggtgggagatcgggtgacgattacctgtagagcgtcacaagatgtgaataccgcagtggcatggtatcaacagaaacccggaaaggcacctaaacttctgatttacagcgccagctttctgtactccggtgtgccatcgaggttctccggttcgcgtagcggaaccgattttaccttgaccatctcaagcctgcaaccagaagattttgcaacttactactgtcaacagcactacactacccctccgaccttcggccagggaaccaaggtggagattaagcgaactgttgccgcaccctccgtattcattttccctccctcggacgagcagcttaaatctggaacggcgagcgtggtgtgtctgctgaataacttctacccacgcgaagcaaaggtccagtggaaggtcgataacgcactgcagagcggtaactcacaggagtcggtcactgaacaagatagcaaagacagcacttactcactgtcgtccacgctgactctttccaaagcagattacgaaaagcacaaggtgtacgcatgtgaagtgacgcatcaagggctgtcgtcgcccgtcaccaaatcattcaatagaggcgaatgt

SEQ ID NO: 15310 - DNA, 714 bp, synthetic construct
  misc_feature 1..714: note = source = /note="Description of Artificial Sequence: Synthetic coding sequence"
  source 1..714: mol_type = other DNA
atggccgtgatggcaccgcgcactttggttcttctgctctcgggagcactggcgctgactcagacttgggccgacatccagatgacccagtccccgtcctcgttgtcggcatcagtgggggacagagtgaccatcacctgccgcgcctctcaagacgtgaatactgcagtggcatggtaccaacagaagcctggcaaagcgccgaagctcctcatctactcagccagctttctgtactcgggtgtccctagccgctttagcgggtcccggtccggtactgacttcactctcacgatctcaagcctgcagcccgaggacttcgctacttattactgccagcagcattacactacgccgcctactttcggtcagggaaccaaggtggaaatcaagcgcactgtcgctgcgcccagcgtctttatcttccctcctagcgacgaacagctgaagtccggaactgcaagcgtcgtctgcctcctcaacaacttttacccgagggaagcgaaggtgcagtggaaggtggataacgccctccaatcaggaaactcgcaggaatcggtcactgaacaggatagcaaggactctacgtattcgcttagttcgactctgaccctttcaaaagctgattacgaaaagcacaaagtctacgcgtgcgaggtgacccatcaaggactgtcctcacccgtgaccaaatccttcaatcgcggggaatgc

SEQ ID NO: 15311 - DNA, 714 bp, synthetic construct
  misc_feature 1..714: note = source = /note="Description of Artificial Sequence: Synthetic coding sequence"
  source 1..714: mol_type = other DNA
atggctgtcatggcgccacgcacactggtgcttctgctgagcggtgctctggccctgacccagacctgggccgatattcagatgacacaaagcccatccagcctgtcggcgtctgtaggcgaccgcgtaacgattacgtgtcgggcaagtcaggacgtaaacacggctgtggcctggtatcagcagaagccaggcaaggcgcccaagcttctgatctactccgcgagctttctctattccggagtcccttcgcgcttttccggtagccgctcaggcacggacttcacattgacgatttcttctttgcagcctgaggacttcgcgacgtactactgccaacagcactataccacgcctccaacgtttggccagggtactaaagtggagattaaaaggaccgttgcagctccgtccgtctttatttttcctccgtctgatgagcagctgaaaagcggcaccgcgagcgtcgtctgccttctgaacaatttctatccacgggaggcaaaagtgcagtggaaggtggataacgcattacagtctggtaacagccaggagagcgtcaccgaacaggatagcaaggatagcacgtactccctgtctagtactctcacgctgagcaaggccgattatgagaaacacaaggtttacgcgtgcgaagtgactcaccagggcctgtcgtccccagtcactaagtcttttaaccgtggtgaatgt

SEQ ID NO: 15312 - DNA, 714 bp, synthetic construct
  misc_feature 1..714: note = source = /note="Description of Artificial Sequence: Synthetic coding sequence"
  source 1..714: mol_type = other DNA
atggctgtgatggccccacggactctcgtcttgctgttatccggggcactggccttgactcagacctgggccgatattcaaatgacccagtctccatcttccctcagtgcctctgttggtgatcgagtgactattacttgtcgcgcgtcccaggatgtgaatacggccgtcgcatggtatcagcagaaacccggcaaagctcccaaacttctcatttactccgctagctttctgtattccggggtgccgtcccgattctcaggatccaggtcagggacagatttcacactgacaattagctcattgcagcccgaggacttcgccacatattactgccagcaacattatactacacctcctacattcggccagggcactaaggttgagatcaaacgaacagtggcagctcccagcgtgttcattttcccacccagcgacgaacaactaaagtctggcactgcatctgttgtgtgcctcttgaataatttttacccgagagaggctaaggtccagtggaaggtggataatgccttacagtccggcaactcacaggaaagcgtgaccgagcaagactctaaggattctacttactccctgtctagtacattgacgttgtcaaaagctgattacgaaaagcataaggtgtacgcttgcgaggtgactcaccagggccttagtagccctgtgacaaagagcttcaataggggcgagtgc

SEQ ID NO: 15313 - DNA, 714 bp, synthetic construct
  misc_feature 1..714: note = source = /note="Description of Artificial Sequence: Synthetic coding sequence"
  source 1..714: mol_type = other DNA
atggccgtgatggcaccccgcacccttgtgctcttgttgtccggcgcgctggcacttacgcagacctgggcggacatccaaatgacgcaaagcccttcatccctgagcgcatcggtgggtgatcgtgtgactattacctgtcgagcttcacaagatgtcaacacggcggtcgcatggtaccagcaaaagccgggcaaggcacccaagctgctcatatacagcgcatcgttcctgtactcgggagttccttcgagattctcaggttcacgtagcggaaccgactttacgcttactatctcctcgttgcaacctgaagattttgcgacttactactgtcagcagcattacactaccccgccaacgttcggacaaggtaccaaggtggagattaagagaaccgtcgctgcaccttcagtctttatctttcctccgtcggatgagcagcttaaatccggcactgcaagcgtggtgtgcctcctgaataacttttaccctcgcgaggcaaaagtacaatggaaggtggacaatgcactccagtccggaaactcacaagagtcggtcaccgaacaagattcgaaggattccacttattcgctcagctcaaccctgaccctttcaaaagctgattacgagaaacacaaagtctacgcatgtgaagtgactcatcagggtctttcgtcccctgtgaccaagtctttcaatcggggagaatgt

SEQ ID NO: 15314 - DNA, 714 bp, synthetic construct
  misc_feature 1..714: note = source = /note="Description of Artificial Sequence: Synthetic coding sequence"
  source 1..714: mol_type = other DNA
atggcggtcatggcgcctagaacccttgttcttctgcttagcggagccctggctctgactcagacctgggcagatatccaaatgactcaatcgccttcctcactcagcgcatccgtgggcgaccgagtcactattacctgtagggcatcccaggatgtgaataccgcagtggcatggtaccaacaaaaacctggaaaggcacctaagttgctgatctactcggcatcctttctttactcaggagtcccatcgaggttttcagggtcacgatccggtactgacttcactcttactatttcaagccttcaacccgaggatttcgcaacttactactgtcaacaacattacaccactcctccaacctttggacaggggacgaaggtggaaatcaagcggacggtcgcagccccaagcgtctttatctttccgccttcggatgaacaacttaagtccggtactgctagcgtcgtgtgcctgctgaacaacttctaccctagagaagcaaaggtccaatggaaggtggacaacgctcttcagtcgggtaattcacaggaatccgtgaccgaacaagattccaaggactcgacttactcgctgtcatcgacgctcaccctgagcaaggcagattacgaaaagcataaagtctacgcttgcgaagtgacccatcaggggctttcatcccctgtgacgaagagctttaatcgcggagaatgt

SEQ ID NO: 15315 - DNA, 714 bp, synthetic construct
  misc_feature 1..714: note = source = /note="Description of Artificial Sequence: Synthetic coding sequence"
  source 1..714: mol_type = other DNA
atggctgtgatggctccccggacactggtgctgttgctgtcaggggctctggctctcacgcagacctgggctgacatccagatgacccagtcaccttctagcctctctgccagcgtaggggacagagtcacaattacttgcagggccagccaggacgttaatacggctgtcgcatggtaccagcagaaacccggtaaagctcccaagcttctgatttactctgcgtcctttttatactccggtgtgccatctcggttctctggatccagatccggcaccgacttcacactgaccatatcatccttgcagcccgaggacttcgcaacctattactgtcagcaacactacacgaccccccctacgtttggacaaggcaccaaggtggagatcaaaagaactgtggcggctccctctgtcttcatcttcccaccctcagacgaacagctcaagagcgggactgccagtgtggtttgtctgttgaacaatttctatccaagggaagccaaggtccaatggaaggtcgataacgcgctgcaatccggcaattcccaggagagtgtcaccgagcaggattcaaaggattctacctattccttgtcaagtacactgaccctgagcaaagcggactatgagaaacataaggtgtacgcatgtgaggttacacatcagggtctgagcagtccagtgaccaaaagcttcaaccgcggggaatgt

SEQ ID NO: 15316 - DNA, 714 bp, synthetic construct
  misc_feature 1..714: note = source = /note="Description of Artificial Sequence: Synthetic coding sequence"
  source 1..714: mol_type = other DNA
atggcggtcatggccccccggacactcgtactgctcttgagcggggcccttgccttgacccaaacttgggccgacatccaaatgacccagtccccgtccagcctttctgcaagcgttggagatagggtgacaattacctgccgagcctcacaggacgtcaataccgccgtggcctggtatcagcagaaaccaggcaaggctccgaagctgctgatttattctgcctctttcctgtactccggggtgccgagccgcttctccggaagccgtagtggaactgatttcacccttacaatatcctcgctgcaacccgaagactttgctacctactattgccagcagcattacacgacccctcctaccttcggacaagggaccaaggtggaaatcaaacgcacagtggcagcgccttccgtgttcattttccccccctccgacgagcaactcaagagcgggaccgcatccgtcgtgtgcctgctgaacaacttctatccccgcgaggcaaaagtgcagtggaaggtagacaatgccctgcaatctggcaattctcaggaatcggtaacagagcaggacagtaaagattccacatacagcctgtcctctaccctgactctaagcaaggctgattatgaaaagcataaagtctatgcatgcgaggttacccaccaggggctgagttcccccgtgaccaagtcctttaacaggggggagtgc

SEQ ID NO: 15317 - DNA, 714 bp, synthetic construct
  misc_feature 1..714: note = source = /note="Description of Artificial Sequence: Synthetic coding sequence"
  source 1..714: mol_type = other DNA
atggcagtcatggctccccggaccctcgttctgctcttgtctggggcactcgccctgactcagacttgggctgacatccagatgacgcagtcgccgagctccctcagcgcatcagtcggggaccgggtcacgatcacctgtcgtgcttcgcaggacgtgaataccgctgtcgcgtggtaccaacaaaagccgggcaaagccccgaaactcctcatctactccgcgagctttttgtacagcggtgtgccatcaagattctccggctcaagatcgggaactgacttcacccttactatttcttccctgcagccggaagattttgccacttactactgccaacagcactataccacccctcccactttcggacaaggaacgaaggtggagatcaagcggactgtcgcggccccaagtgtgtttatctttccaccgagcgatgagcagttgaagtctgggaccgcgtccgtcgtatgcctgcttaacaatttctacccacgcgaagccaaggtccaatggaaggtggataacgcactgcagagcggtaacagccaggaaagcgtgacggaacaagattcgaaggactcaacttacagcctctcctcaacgctgactttgagcaaggcggactacgaaaagcataaagtttacgcatgcgaagtcactcaccagggcctgtcctctcctgtgacgaagagcttcaatagaggagagtgc

SEQ ID NO: 15318 - DNA, 714 bp, synthetic construct
  misc_feature 1..714: note = source = /note="Description of Artificial Sequence: Synthetic coding sequence"
  source 1..714: mol_type = other DNA
atggctgtcatggcgccaagaactctggtgctgctgctctccggcgccttagcattaacccaaacctgggccgacatccagatgacccagagtcctagcagtcttagcgcctctgtgggagacagggtgactatcacatgtagagcatcacaggatgttaatactgctgttgcatggtaccagcagaagccagggaaggctcctaagctattgatctactccgcatcattcctgtatagcggcgtgccctctaggttttcaggatcccgcagcggcaccgatttcaccttaaccatttcatctttgcagccggaagactttgcaacttactactgccaacagcactatacaaccccacccacatttggccaggggactaaagtggaaattaagcggacggtggcagctccgtcagtctttattttccctccttctgacgaacagctcaaatccggtacagcctcagtggtgtgccttctgaataacttctatcctagagaggcaaaggttcaatggaaggtggataacgccctccagagcggcaattctcaggagagcgtgaccgaacaggatagcaaggactcaacttactccttgtcttctaccctaacgctatcaaaggccgactacgagaagcacaaagtctatgcatgcgaggtgacacaccaaggtcttagcagccccgtcaccaagagctttaatcgaggagaatgt

SEQ ID NO: 15319 - DNA, 714 bp, synthetic construct
  misc_feature 1..714: note = source = /note="Description of Artificial Sequence: Synthetic coding sequence"
  source 1..714: mol_type = other DNA
atggcggttatggcgccgcgaacgctagtattactattatcgggtgcgctagcgttaacgcaaacgtgggcggatatacaaatgacgcaatcgccgtcgtcgctatcggcgtcggtaggtgatcgtgtaacgataacgtgtcgagcgtcgcaagatgtaaatacggcggtagcgtggtatcaacaaaaaccgggtaaagcgccgaaactattaatatattcggcgtcgtttttatattcgggtgttccgtcgcgattttcgggttcgcgttcgggtacggattttacgttaacgatatcgtcgctacaaccggaagattttgcgacgtattattgtcaacaacattatacgacgccgccgacgtttggtcaaggtacgaaagtagaaataaaacgtacggtagcggcgccgtcggtatttatatttccgccgtcggatgaacaactaaaatcgggtacggcgtcggttgtatgtttattaaataatttttatccgcgagaagcgaaagtacaatggaaagttgataatgcgttacaatcgggtaattcgcaagaatcggttacggaacaagattcgaaagattcgacgtattcgttatcgtcgacgctaacgttatcgaaagcggattatgaaaaacataaagtatatgcgtgtgaagtaacgcatcaaggtttatcgtcgccggttacgaaatcgtttaatcgtggtgaatgt

SEQ ID NO: 15320 - DNA, 714 bp, synthetic construct
  misc_feature 1..714: note = source = /note="Description of Artificial Sequence: Synthetic coding sequence"
  source 1..714: mol_type = other DNA
atggccgtgatggccccacgcactttggtgctgttgttgtcaggcgctcttgcgcttacccagacttgggcggacatccagatgactcagtcacctagcagcttatccgcatctgtcggtgatcgcgtgacaattacttgtcgcgcctcccaggatgttaacacagctgtggcatggtaccagcagaagccagggaaggctcccaagctcctgatctatagtgcctcctttctctatagcggggtacccagccggttctccgggtctcgctctgggactgacttcacactcacaattagcagcctacaaccggaagatttcgctacctactattgtcagcagcactataccactcccccgactttcgggcagggaactaaggtggagattaagcgcactgtggcagcacctagcgtgttcatcttccctccttccgatgaacagctcaagtctggcactgctagcgtggtgtgcctcctgaataacttctacccaagagaagcaaaagtccagtggaaggtggataacgccctccagagcggaaacagtcaagagtccgtaacagaacaggactcaaaagactctacctattccctttctagcacactgaccctatctaaggctgattatgagaagcacaaagtgtatgcttgtgaggttacgcaccagggactttcaagtcccgtgacaaaaagctttaatagaggggagtgc

SEQ ID NO: 15321 - DNA, 714 bp, synthetic construct
  misc_feature 1..714: note = source = /note="Description of Artificial Sequence: Synthetic coding sequence"
  source 1..714: mol_type = other DNA
atggctgtgatggcaccgaggactctggtccttctgctgtccggagctctcgccctgactcagacttgggccgatatacagatgacacagagcccatcctccctctcagcatcagtgggggaccgagtaaccatcacttgccgagctagtcaggatgttaatacagctgtggcctggtatcagcagaaaccagggaaggcgcctaagcttctcatatattcggcgtcctttctgtactctggagtgccatccaggttttccggctctcgatcaggaactgactttaccctaaccatttcaagccttcagcccgaggatttcgccacatattattgccagcaacattacactacaccacctaccttcgggcagggcacaaaggtcgaaattaaaaggacggtcgccgcgccatcagtgtttatcttccccccatcggatgagcagctgaagtcggggacggcctcagtggtttgtctacttaataacttctatccacgtgaggctaaagtgcagtggaaagttgacaatgctctacagagtggtaatagccaagaatctgtgaccgaacaggatagcaaagactcaacctacagcctctcttcaactctgacccttagcaaagccgactacgagaagcacaaagtttacgcatgtgaggtgacacaccaagggttgtccagccccgtaaccaagagcttcaaccgtggagagtgt

SEQ ID NO: 15322 - DNA, 714 bp, synthetic construct
  misc_feature 1..714: note = source = /note="Description of Artificial Sequence: Synthetic coding sequence"
  source 1..714: mol_type = other DNA
atggctgtcatggccccgcggaccctggtccttctgctgagcggggcactcgccctgacccagacatgggccgacatacaaatgacgcagagcccatcaagcctttctgcctcagtgggcgaccgggtgacaattacatgcagggccagtcaggacgtgaatactgccgttgcttggtaccaacaaaaacccggcaaggcgcccaagcttctcatctactccgctagttttctgtatagtggcgtacccagcagattctctgggtccagaagcgggacagatttcacactgaccatctcctcactgcagccggaggactttgctacgtactattgccagcaacactatacaacaccgcccactttcgggcagggcaccaaagtcgagataaagagaacggtggccgcaccgtccgtgttcatcttcccaccgtctgacgagcaacttaaatctggcaccgcaagcgtagtctgccttcttaataacttctatccaagagaggctaaggttcagtggaaggtggataacgctcttcaaagcggaaatagtcaagaatccgttactgaacaagacagcaaagactcaacttacagcctttcttcaacgctgaccctgagcaaggctgattatgagaagcataaagtctacgcatgcgaggtgacccaccagggactgtcatcccctgtcaccaagtcattcaatcgaggagagtgc

SEQ ID NO: 15323 - DNA, 714 bp, synthetic construct
  misc_feature 1..714: note = source = /note="Description of Artificial Sequence: Synthetic coding sequence"
  source 1..714: mol_type = other DNA
atggcagtcatggcccctagaacgctcgtgcttctgttgagcggtgcccttgccctcactcagacctgggccgacattcagatgacccagtcaccaagctcgctgtccgcttccgtcggtgaccgggtgacgattacttgtagagcaagccaagacgtcaataccgcagtggcatggtaccaacaaaagcctggaaaggcaccgaaactcctgatctatagcgcatccttcctgtactccggtgtgccgtcgagattttcgggatcccgctccgggactgattttacgctcaccattagctcccttcaaccagaagatttcgccacctactactgccagcagcactacactacccctcccacttttggtcaggggactaaggtcgagatcaagaggaccgttgcagcacccagcgtgttcatttttccacccagcgacgaacaattgaagagcgggactgcatctgtggtgtgccttcttaacaacttctacccacgagaagccaaggtgcagtggaaggtggataacgcgcttcagtcaggcaactcccaggaatcagtgacggagcaggattcaaaagactcgacttattccctgtcctcgactctcacgctgtcaaaggccgattacgagaagcataaggtttacgcctgtgaagtcacccatcaaggactcagctcgcccgtgactaagagctttaacagaggagagtgc

SEQ ID NO: 15324 - DNA, 714 bp, synthetic construct
  misc_feature 1..714: note = source = /note="Description of Artificial Sequence: Synthetic coding sequence"
  source 1..714: mol_type = other DNA
atggccgtaatggccccacgcaccctagtcctgcttctgagcggtgctctagctctgacgcagacatgggccgacattcagatgacccagagtcctagctctctgtccgcaagtgtgggcgatcgggttacgatcacttgtcgggcgagccaggacgtgaacaccgcggtcgcatggtaccaacagaaacccggaaaggcgccgaagctgttgatttattcagcctcattcttgtactctggggttccttcacgattcagcggctcgaggtccggcactgattttactttgaccatatcatcactccagccggaggattttgcgacctattactgtcaacagcattacaccactccccctacttttggacagggcactaaggtggaaattaagcgaacagttgccgcccctagtgttttcatattccccccttcggatgagcagctgaagtcgggaaccgctagcgtggtgtgcctcctcaacaatttctatcccagggaagcgaaggtacagtggaaagtggacaatgctctgcaatccggcaattcacaggaaagtgttacggaacaagactccaaggactccacctacagtctcagctcaacactgacactctccaaggccgattatgagaagcacaaggtgtacgcctgcgaggtcactcatcaaggtctctcgagccccgtcacgaaatccttcaacagaggggaatgc

SEQ ID NO: 15325 - DNA, 714 bp, synthetic construct
  misc_feature 1..714: note = source = /note="Description of Artificial Sequence: Synthetic coding sequence"
  source 1..714: mol_type = other DNA
atggccgtgatggctccacgcacgctggtgcttctgctctccggggccttagccctgactcagacctgggcagatatccagatgacacagagtccttcctctcttagcgccagtgtgggagatcgagttactataacctgcagggcgtcacaggacgtcaacaccgccgtggcctggtaccagcagaaaccaggcaaggctcctaaactccttatatactccgccagcttcctttactccggggtgcctagccggttcagtggaagtcggtccggaactgactttaccctgactatctcttctcttcagcccgaggacttcgccacctactactgtcaacaacactataccacccctccaacatttggccagggaactaaagtggaaatcaagcggaccgtggctgcgccttccgtctttatattccctcccagcgatgagcagctcaaatccggaaccgcttctgtggtgtgcctcttgaacaacttctatcctagagaagccaaggtccagtggaaggtcgataacgctctgcagtccggcaactcccaggaatccgtgaccgagcaggatagtaaagacagcacatatagcctgagctctactctcacgctgtcaaaggcagactatgagaagcataaggtgtacgcgtgcgaagtgactcaccaggggctttcgtcgcccgtgactaagagcttcaatagaggggaatgc

SEQ ID NO: 15326 - DNA, 714 bp, synthetic construct
  misc_feature 1..714: note = source = /note="Description of Artificial Sequence: Synthetic coding sequence"
  source 1..714: mol_type = other DNA
atggccgtgatggcaccacggactctggtgctgcttctgtccggtgccttggcccttactcaaacctgggcagatattcagatgactcagtcaccctccagcctgtccgcctccgtgggcgaccgtgtcactattacctgtagggcatcgcaagatgtgaacaccgcagtcgcttggtatcagcaaaagccaggcaaggcacctaagctgctcatttactcagcatctttcctctacagcggtgtccccagcagattttccggatcaaggtcaggcactgattttaccctcaccatatcatcgctgcaaccagaagattttgctacgtactattgccagcagcattacacgaccccaccaacttttggtcaagggactaaagtggagatcaaaagaactgtggccgccccttcagtattcatttttcctccgtctgatgaacagctcaaatcagggacggcctctgtggtgtgccttcttaacaacttttaccctagggaggctaaggtgcaatggaaagtcgataatgcgcttcagagcggtaattcccaggaatcggttacggagcaagattccaaggactcaacttactcgctttcgtccacgctgacgctgtcgaaggccgactacgaaaagcataaggtgtacgcatgtgaagtgactcaccaaggtctttcgtcacctgtgaccaaatccttcaaccggggcgaatgt

SEQ ID NO: 15327 - DNA, 714 bp, synthetic construct
  misc_feature 1..714: note = source = /note="Description of Artificial Sequence: Synthetic coding sequence"
  source 1..714: mol_type = other DNA
atggcagtcatggcaccccgaactctggtccttctcctcagtggagctctggcattaactcagacatgggcagacatccagatgacgcagtccccatccagtttgtccgcaagtgtaggcgatagagtaacgataacctgcagagcttcacaagacgtcaatacagccgtcgcctggtaccagcaaaaaccaggaaaggccccaaagctcctgatttactctgcgagttttctttattccggagtcccgagtcggttttccggctcgagatcaggcactgattttactctgaccataagcagcttgcagcctgaggacttcgctacctactattgtcagcagcactatacaaccccgccgacatttggacaggggaccaaggtcgagatcaagcgcactgtggcagccccatcagtctttatcttcccccctagtgacgaacagctgaagagtggcacagccagcgtggtgtgtcttctgaataacttttatcccagggaagctaaagtgcagtggaaagtagacaacgccctgcagagtggcaattcccaggaaagcgtaacagagcaagactcaaaagatagcacttactctcttagcagcacgcttacactttctaaggccgattacgagaaacacaaagtctatgcatgcgaagttacccaccagggccttagcagccccgtcaccaagtccttcaaccgaggggaatgt

SEQ ID NO: 15328 - DNA, 714 bp, synthetic construct
  misc_feature 1..714: note = source = /note="Description of Artificial Sequence: Synthetic coding sequence"
  source 1..714: mol_type = other DNA
atggcagttatggcaccaagaacactcgtattattattaagtggagcattagctttaacacaaacatgggcagatattcaaatgacacaatcaccatcatcattatcagcatctgttggagatagagtcacaattacctgtagagctagtcaagatgtcaataccgcagttgcttggtatcaacagaaaccaggaaaagctccaaaattgctaatttatagtgcttcatttctttatagtggtgttccatcaagattttcaggatcacgaagtggaacagattttactttaacaatttcaagtttacaaccagaagatttcgcaacttattattgtcagcaacattatactacaccaccaaccttcggacaaggtactaaagttgaaattaaaagaactgttgcagcaccttcagtttttatattcccaccatcagatgaacaacttaagagtggaactgcatctgttgtttgcttacttaataatttttatccacgtgaagctaaagtacaatggaaagttgataatgcattacaatcaggtaattcacaagaatcagtcacagaacaagattcaaaggattcaacctatagtttatcatcaacattaacacttagtaaagctgactatgaaaaacataaagtgtatgcatgtgaagttactcatcagggattatcttctccagtaacaaaatcttttaatagaggagaatgt

SEQ ID NO: 15329 - DNA, 714 bp, synthetic construct
  misc_feature 1..714: note = source = /note="Description of Artificial Sequence: Synthetic coding sequence"
  source 1..714: mol_type = other DNA
atggctgtcatggctcctcggaccttggtcctcctgctctctggtgcactggccttgacccagacatgggcggatattcaaatgacgcagagcccttcgagcctctcggcctctgtcggagaccgtgttaccattacctgccgagcctcgcaggacgttaacacagcggtggcctggtatcagcagaagccgggtaaggctcccaagctgctcatctactctgcatcgttcttgtacagcggcgtcccctccaggttttcgggctcccgctcgggtaccgattttacgcttacaatctctagcctccaacccgaggatttcgcaacttactattgccagcagcattacaccacgccgcctaccttcggtcagggcactaaagtcgagattaagcgcacagtcgctgctccgtctgtctttattttccctccctctgatgaacagttaaagtccggaactgcaagtgtggtttgtctccttaacaacttctacccgagggaggcgaaggtgcagtggaaggtcgacaatgccctccagtccggtaactcccaagagtcggtcaccgagcaagattccaaggacagcacctattctctgtcgagcaccctgaccctctcgaaggctgactacgaaaaacacaaggtttacgcttgtgaggttacgcaccaaggtctaagctcccccgtgactaagtccttcaaccgtggtgaatgt

SEQ ID NO: 15330 - DNA, 714 bp, synthetic construct
  misc_feature 1..714: note = source = /note="Description of Artificial Sequence: Synthetic coding sequence"
  source 1..714: mol_type = other DNA
atggccgtcatggctcctaggactctcgttcttctcctgtctggagctctcgctctgacacagacctgggctgacatccaaatgacccagagcccgtcatcactcagcgcaagtgttggcgaccgtgtcaccattacctgtagggctagccaggacgtgaacacagctgtggcatggtaccagcagaagcctggaaaggctccaaagcttctcatatattccgcttcatttctatattcaggcgtccccagtcgcttttcaggctctagaagcggaacagactttactttgacaatcagttcactccagcccgaggatttcgccacttattattgtcagcagcattacacaacaccccccacgttcggccaggggactaaggttgagattaagcggaccgttgctgcgccatccgtctttattttcccgccctcagacgaacagttgaaatctgggactgcttccgttgtgtgcctgctgaacaatttctaccctcgggaggcaaaggttcagtggaaggtcgataacgccctgcagtcaggtaattcacaggagagtgtgacagaacaggatagtaaagacagcacctactccctcagctccaccctgacgctctcgaaggccgactatgaaaagcataaggtctacgcgtgcgaggtgactcaccaagggctgagcagtcccgtgaccaaatccttcaaccggggggaatgc

SEQ ID NO: 15331 - DNA, 714 bp, synthetic construct
  misc_feature 1..714: note = source = /note="Description of Artificial Sequence: Synthetic coding sequence"
  source 1..714: mol_type = other DNA
atggcggtaatggcaccgagaacattggtactgttgctttccggggcgttagccttgacccagacatgggctgatatacaaatgactcagagcccatcgtcattgtcggctagtgttggtgatagggttacaattacgtgcagagcaagccaagatgtgaataccgctgtggcttggtatcaacaaaagccgggtaaggctccgaagttgctcatttacagtgcttcattcttatatagcggagtgccatccagattttcgggatccagatcaggtacggatttcactttaacaatcagttctttacagccagaggatttcgctacatattattgccaacagcactatactaccccaccaacttttggacagggaactaaggtcgaaattaagagaactgttgcagccccttctgtatttatcttcccaccgtcagatgaacaactcaagtctggaacggcgtccgtcgtctgcttgcttaataacttttaccctcgagaagctaaagtacaatggaaggtagacaatgcactacaatccggaaattcccaagaatcagtgaccgagcaagattccaaggattcaacatactcacttagttccactcttactctttcaaaggccgattatgaaaaacataaagtttatgcttgtgaagttacgcaccaaggtctctcatcaccggtgactaaaagttttaatcgtggagagtgt

SEQ ID NO: 15332 - DNA, 714 bp, synthetic construct
  misc_feature 1..714: note = source = /note="Description of Artificial Sequence: Synthetic coding sequence"
  source 1..714: mol_type = other DNA
atggcggtcatggcaccccgcacccttgtcctgctgctttcaggggcgcttgcgctgacgcagacctgggcggatattcaaatgacgcaatcaccttccagcctgtcggcatcagtgggggaccgcgtgaccattacttgccgtgcatcgcaagacgtgaacactgctgtcgcatggtaccagcaaaagccaggaaaggcacctaagctgcttatctactcggcctccttcctgtactccggagtcccttcgcggttttccggcagtagaagcggaacggactttactctgaccattagctccctgcaacctgaagatttcgccacttactactgtcaacaacattacaccactcccccgacttttggacaaggaactaaggtggaaatcaagcggactgttgcagcaccttcggtctttatctttccaccaagcgatgaacaactgaaatcgggcaccgcttcagtggtctgtctcctgaataacttttacccaagagaggcaaaggtgcagtggaaggtggacaacgcactgcaatcgggaaactcccaagaatcggtgacggaacaggattcaaaggactccacttactcgctgtcgtccaccctgacgctgtccaaggcagactacgaaaaacataaggtgtacgcatgtgaagtgactcaccaggggttgtcgagcccagtgaccaaatcctttaatcgtggcgagtgc

SEQ ID NO: 15333 - DNA, 714 bp, synthetic construct
  misc_feature 1..714: note = source = /note="Description of Artificial Sequence: Synthetic coding sequence"
  source 1..714: mol_type = other DNA
atggcagtgatggcgcctagaactctcgtgttgctgctatctggtgcattggcactcacccaaacctgggccgacattcagatgacacaatcgccctcatctttatcagcctctgtcggcgaccgtgtgacaatcacctgcagggcctcccaagatgtgaacacagccgtcgcctggtaccagcagaagccagggaaggccccgaagctcttgatctactcagcaagcttcttatacagtggagtgccctccaggtttagtggctctaggtctggaacagatttcacactgaccatctcctccttgcagcctgaagattttgcaacgtactattgccagcagcattatactacacccccaaccttcggccagggaaccaaggttgaaattaagcgcactgtcgcagctcccagcgtgttcatctttcccccgtctgatgagcagctaaagtcaggcactgccagcgttgtgtgtctgctgaacaacttctatccacgcgaggctaaggttcaatggaaagttgataatgccttgcagtctggcaattcgcaggagtctgtcacagaacaggacagtaaggatagcacatattcactcagctccaccctgactctgtccaaggcagactacgagaagcacaaagtttacgcctgcgaggtcactcatcaaggtcttagttcccctgtgaccaaatcctttaatcgcggggagtgt

SEQ ID NO: 15334 - DNA, 714 bp, synthetic construct
  misc_feature 1..714: note = source = /note="Description of Artificial Sequence: Synthetic coding sequence"
  source 1..714: mol_type = other DNA
atggcagtcatggcacctcgcaccctggttctcctcctctcaggggccctcgccttgacccagacgtgggccgacatccaaatgactcaaagcccgtcctccttgtccgcatcagtgggggacagagtaactatcacctgccgggcctcccaggacgtgaacactgcagtggcgtggtaccagcagaagccgggcaaggcaccgaagctgcttatctactcagcgtcgtttctctacagcggagtgccatcccggttttccggatcccgcagcggaaccgatttcacgcttaccatctcgtccctgcagcccgaagatttcgccacctactactgtcaacagcattacacgactccacccactttcggccaaggaaccaaggtcgaaatcaaacggactgtcgccgcgccgtccgtgttcatcttcccgccttccgacgaacaactgaagtccggaactgcttcggttgtgtgtcttttgaacaatttctaccctagggaggcaaaagtgcagtggaaggtggacaatgcgttgcagtcgggtaacagccaagaatcggtcaccgagcaggattccaaggattcgacctactcacttagcagcactctcaccttgtccaaggcagactatgagaaacacaaggtgtatgcctgcgaggtgactcatcaggggctgagctccccggtgacgaaatcctttaatcggggcgaatgc

SEQ ID NO: 15335 - DNA, 714 bp, synthetic construct
  misc_feature 1..714: note = source = /note="Description of Artificial Sequence: Synthetic coding sequence"
  source 1..714: mol_type = other DNA
atggcagttatggccccgaggactctggtcttactcctgtccggtgcgcttgccctgacacagacctgggcagacattcagatgactcagtctccgtcttctctctccgcctctgtgggcgacagggttaccattacatgccgtgcttcccaggatgtcaacacagcggtagcatggtatcaacagaagccaggaaaagcaccaaagcttctgatttacagcgctagttttctgtattcaggagttccatctagattttcgggtagtagatcagggaccgatttcactctgacgatttccagcctccaacctgaggactttgcgacgtactattgccagcaacattatactacccctccgacgttcggacagggcacgaaggtggaaatcaaaaggaccgtggctgcgccatcagtgttcattttcccacccagtgatgagcagctgaagagcgggaccgcctctgtggtctgtctcctgaataatttttatccccgtgaagccaaagtacagtggaaggttgacaacgccttacagagtggcaattcacaggagagcgttactgagcaagatagtaaggatagcacatactcactgtcaagtacactgactctttctaaagccgattatgagaaacataaggtttacgcatgtgaggtgactcatcaggggctaagttcaccggtgactaaatccttcaaccgcggcgagtgc

SEQ ID NO: 15336 - DNA, 714 bp, synthetic construct
  misc_feature 1..714: note = source = /note="Description of Artificial Sequence: Synthetic coding sequence"
  source 1..714: mol_type = other DNA
atggcagtgatggccccgcggacccttgtcctgctgctgtcaggcgctctggcgcttacccaaacgtgggccgatatccagatgactcagtctccgtcctcactgagcgcttccgtgggggatcgggtcaccatcacctgccgcgcctcccaggacgtcaatactgcagtggcttggtaccagcaaaaacctggtaaggctccgaagctgctcatctacagcgcatcgttcctttactcgggcgtcccttcccgctttagtgggtccagatcgggtaccgacttcactttgactatttcctccctgcagcctgaggactttgccacctattactgccagcaacactacacgactccgccgacgttcgggcagggaacgaaggtcgagatcaagcgcaccgttgccgcgccgtccgtgttcatcttccccccttcagatgagcaactgaaatcgggaactgcgtcagtggtgtgcctgctgaataacttttaccctcgcgaggccaaggtgcaatggaaagtggataacgccttgcaatccgggaactcgcaggagtcggtgactgaacaggactcgaaggactctacctactccctgtcctcgaccctcactctctcaaaagcagactacgagaagcataaggtctacgcctgtgaggtcacccaccagggactgagctcacccgtgacgaagtcctttaaccgcggtgaatgc

SEQ ID NO: 15337 - DNA, 714 bp, synthetic construct
  misc_feature 1..714: note = source = /note="Description of Artificial Sequence: Synthetic coding sequence"
  source 1..714: mol_type = other DNA
atggctgtgatggctccacgcacgcttgtgctactcttgtccggcgcgctcgctctaacccagacatgggccgacattcagatgacccagtcaccttcctccctgagtgccagtgttggagatcgcgtgactatcacttgtcgggcgtcccaggatgtgaacaccgccgtggcttggtaccaacagaagcccggcaaggcgcctaagttgttaatttactcagccagtttcctgtacagcggcgtgcccagtcgcttctcgggctcacgctccggtaccgactttacactgaccatcagttccctgcagccagaggacttcgccacatactattgccagcagcactataccaccccaccaactttcggacagggcacaaaggtggagattaagaggaccgtagccgcgccatccgtgttcatcttccctccatctgacgagcagttgaagagcggtacagcttccgtcgtgtgcctgttgaacaatttctacccacgtgaggcgaaggtccagtggaaggtagacaacgctctacagagcggcaattcccaagaatccgtcacggaacaggatagcaaagattccacgtacagtctgtctagtacactgacgttatcaaaagccgattatgaaaaacataaggtctacgcgtgcgaagtcacccaccaagggttgagcagcccagtgaccaaatctttcaatcgcggcgaatgt

SEQ ID NO: 15338 - DNA, 714 bp, synthetic construct
  misc_feature 1..714: note = source = /note="Description of Artificial Sequence: Synthetic coding sequence"
  source 1..714: mol_type = other DNA
atggccgtcatggcgccacggacacttgtactcttgctgtctggcgctttggccctgacccaaacttgggccgatatccaaatgacccaatctccaagcagcctgagtgcaagcgtgggagatcgggtgacaatcacatgtagggctagccaggatgttaacacagctgtagcgtggtaccagcagaagcctggcaaagcgcctaaactgctcatctacagcgcaagctttctctatagcggcgtgccctctaggttcagtggatcacggtctggaactgacttcacattgaccatctcttctttacagcctgaggattttgctacttattactgccagcaacattacactaccccccctaccttcggacagggaaccaaggtggagatcaaacggactgttgccgcgcctagtgtctttatattcccaccttcagatgaacagctgaaatccggaactgcatcagtagtgtgtctgctgaataacttctacccacgtgaggctaaggtccagtggaaagttgacaatgcgctgcaatccgggaacagtcaggagtctgtgacagaacaagattccaaggattccacttacagtttgtcttcaacccttacactgtctaaagccgactacgaaaaacataaagtctatgcatgcgaagtgacacatcaaggactgagcagtccagtgaccaaatccttcaaccgaggcgagtgc

SEQ ID NO: 15339 - DNA, 714 bp, synthetic construct
  misc_feature 1..714: note = source = /note="Description of Artificial Sequence: Synthetic coding sequence"
  source 1..714: mol_type = other DNA
atggcagtgatggccccccggacactggtcctgctgctgtcaggggctctggctttaacccagacatgggcagatattcaaatgacacagtctccaagttcactgtcagcctctgtcggggatagggttaccataacctgtagggctagtcaggacgtgaacactgcagtcgcatggtatcagcaaaagcccggcaaagctcctaagttactcatatacagcgcatcttttctgtacagcggggtgccaagtagattcagcggatccagatctggtaccgatttcaccctgactatcagcagcctgcaacctgaagacttcgcaacctattactgtcaacaacactacaccacaccaccaacttttggccagggcaccaaggtcgagattaaaagaaccgtcgctgcacctagcgtgttcatttttccccctagcgacgagcagttaaaaagtggcacagcttctgtggtgtgcctcctgaataacttctatccaagagaggccaaggttcaatggaaggttgacaatgccctacaaagcggtaacagccaggagtctgttactgaacaggacagtaaggactccacctacagcctgtcttctacattgaccctaagcaaagctgattacgagaaacataaggtgtatgcttgtgaggttacccaccagggcctgagttcccctgtcaccaagtccttcaacaggggagagtgc

SEQ ID NO: 15340 - DNA, 714 bp, synthetic construct
  misc_feature 1..714: note = source = /note="Description of Artificial Sequence: Synthetic coding sequence"
  source 1..714: mol_type = other DNA
atggctgtaatggcccccaggaccctagtcctgctcctgagtggcgcgctggccttaacgcagacctgggctgatattcaaatgacgcaatccccttcttccttgtcagcgagcgtcggcgaccgcgttactattacatgtcgcgcatctcaggatgtgaacactgctgtggcatggtaccagcagaaaccgggcaaagcacccaagctcctcatctattcagcatcctttttatactctggggtgccttcccgcttcagcgggagtcggtctgggaccgattttacgctgacaataagcagtctgcagccagaagacttcgccacctattactgtcagcaacactatacaacccctccaacatttggccaaggcacgaaggtggagatcaagaggaccgtggctgctccgtctgtgttcatcttccccccttcagacgaacaactcaaatccgggaccgcctctgtggtgtgcctgctgaacaatttctacccaagagaggctaaggtacagtggaaagtcgataacgctctgcagagtggaaactcgcaggagagcgtgaccgagcaggactctaaggacagtacttattccctgtcttccaccttgacccttagcaaggcggattatgagaaacacaaggtgtacgcgtgcgaggtgactcaccagggtctgagctcccccgtcaccaagtctttcaacagaggcgagtgc

SEQ ID NO: 15341 - DNA, 714 bp, synthetic construct
  misc_feature 1..714: note = source = /note="Description of Artificial Sequence: Synthetic coding sequence"
  source 1..714: mol_type = other DNA
atggccgtcatggcgcctaggaccctggtgctgctgctttcgggagctcttgcacttacgcagacttgggcagacatccaaatgactcagtcaccatccagcctttccgcatctgtgggagatcgtgtgactattacgtgccgcgcgagccaggatgtgaataccgccgttgcatggtaccaacaaaaacccgggaaggccccaaagctgctgatttactcagcatcttttttgtactcgggtgtgccctcgcgattttcgggttcaagatcggggaccgatttcacgctgaccatctcctcccttcagccagaggactttgcgacttattactgccagcagcattacactacccctccaactttcggacaaggaactaaagtggaaatcaagcgcactgtggccgctccttccgtgtttatctttccaccttcggatgagcaacttaagagcggtaccgcatccgtggtgtgtctcctgaataacttttacccaagagaagccaaggtacaatggaaagtggataacgcccttcagagcggtaactcgcaagaatcagtgaccgaacaggatagcaaggactccacttactcgctttcctccacccttactctttcgaaggcggattacgaaaagcataaggtttacgcatgtgaagtcactcatcaaggtttgtcatccccagtcaccaagtcgttcaataggggcgaatgc

SEQ ID NO: 15342 - DNA, 714 bp, synthetic construct
  misc_feature 1..714: note = source = /note="Description of Artificial Sequence: Synthetic coding sequence"
  source 1..714: mol_type = other DNA
atggcggttatggccccaagaacgttagtactattactgtccggagcactggctctgacacagacatgggcagacattcaaatgacacaaagcccttcatccctgtcagcatcagtgggagacagagttacaatcacctgtcgtgcaagccaagacgtcaacacagcagtggcttggtatcagcaaaagccaggaaaagctcccaaacttttgatctactcggcttcatttctttattctggagtgccgtcaagatttagcgggtcgcgctctggcacggacttcacactcactattagctctctgcagccagaggactttgcaacttactactgtcagcaacattatacgaccccgccaacattcggccagggtacaaaggtggaaattaaacggacggttgctgcaccttcagtgttcatctttccgccttcggatgaacaacttaaatccggaaccgctagcgtcgtgtgtcttcttaataatttttacccacgtgaggctaaagttcaatggaaagtggataatgcattgcaatccggcaacagccaagagtctgttacagaacaggatagtaaagactccacatactcattatcgagcactctcactctgagtaaggcggattacgagaaacataaagtttatgcgtgcgaagtgacacaccaggggttatcttcaccggtgacaaaatctttcaatcggggagagtgc

SEQ ID NO: 15343 - DNA, 714 bp, synthetic construct
  misc_feature 1..714: note = source = /note="Description of Artificial Sequence: Synthetic coding sequence"
  source 1..714: mol_type = other DNA
atggctgtaatggctcctcggacactggtgctccttttgtccggggctctcgctctgacacagacgtgggctgatattcagatgactcagagcccttcctcattaagtgcatccgtcggagacagggtaaccataacctgtcgggcctcacaggacgtcaatacagcagttgcatggtaccagcagaagccgggtaaagctcccaaactactgatctattccgcctctttcctctactctggcgtgccctctcggttttctggctcgcggagcgggaccgacttcactctgaccataagttcattgcagccggaggattttgccacatactactgtcagcaacactatacaacgccgcctacctttggccagggtactaaggttgagatcaagagaacggtggcggccccttccgtgtttatcttcccaccttctgatgagcagctaaagtcaggcactgcttcagtcgtctgcttgctcaacaacttttacccacgtgaggccaaggtgcagtggaaggttgacaacgccctgcaatccgggaatagtcaggagtctgtcacagagcaagattcaaaggattccacatactccctctctagcacactcactctgtccaaagccgactatgagaagcacaaggtctatgcctgcgaagtcactcatcagggactttccagtcctgtgacaaagagcttcaataggggagagtgc

SEQ ID NO: 15344 - DNA, 714 bp, synthetic construct
  misc_feature 1..714: note = source = /note="Description of Artificial Sequence: Synthetic coding sequence"
  source 1..714: mol_type = other DNA
atggccgttatggcaccccgcacactcgtgctgctgctttctggggcgcttgccctgacacagacgtgggcagatattcagatgacacagtcaccttcctcactttcagctagtgtgggagatcgagtcactattacatgtcgggcgtctcaggatgtcaacacagcggtggcctggtatcagcagaaacccgggaaagccccaaagctgttaatctattcagcttcctttctgtattccggggtcccttccaggttctctgggagtcggtccggaacagatttcacactgacaatctcctcattacagcctgaagattttgcaacttattattgtcagcagcattatacaacacctcctactttcgggcaggggactaaggtggaaataaaaaggactgttgccgctccatcagtgtttattttccctccaagtgatgaacagctcaaaagtggaactgcttcggtagtttgcctcctcaataacttttatcccagagaagctaaggtgcagtggaaggtcgacaacgcacttcagtccggaaattcacaggaatctgtgactgaacaggattcaaaagattccacttattcgctctcatctacactcacattatccaaggctgactatgaaaaacacaaggtgtatgcttgcgaagtgacacatcaggggttaagttctcctgtaacaaaatcattcaacaggggggagtgc

SEQ ID NO: 15345 - DNA, 714 bp, synthetic construct
  misc_feature 1..714: note = source = /note="Description of Artificial Sequence: Synthetic coding sequence"
  source 1..714: mol_type = other DNA
atggccgtaatggcccctaggacacttgtgctgcttctgtctggcgcgctcgccctgacccagacttgggcggacattcaaatgacccagtccccctccagtttgtccgctagcgttggtgaccgagtaactatcacctgccgggcttctcaggacgtaaacactgcagtggcttggtaccaacaaaaacctggaaaggctcctaagcttcttatttactcagcttcctttctttactccggggtcccgagcaggttctctgggtctagaagcggtaccgacttcacactgaccatatctagcctgcagcccgaggacttcgcaacatattattgccagcagcattacacaacgccccctaccttcggccagggcaccaaagtggagattaagcgcaccgttgctgcgcctagcgtcttcatctttccaccgagtgacgagcagctcaaatccggcaccgcaagcgtggtttgccttctgaataatttctatcctcgcgaggccaaggtccagtggaaagtggacaacgccctgcagtcagggaatagtcaagaatccgtgacggaacaagactctaaggattctacttatagcctttctagcacactcactctctcaaaggcagattacgagaagcacaaggtgtatgcatgcgaagtaacccaccaggggttgtcttccccagtgaccaaatccttcaacagaggcgagtgc

SEQ ID NO: 15346 - DNA, 714 bp, synthetic construct
  misc_feature 1..714: note = source = /note="Description of Artificial Sequence: Synthetic coding sequence"
  source 1..714: mol_type = other DNA
atggcggtcatggcacctagaaccctcgtgctgcttctgtcgggcgctcttgcgttgacccaaacctgggctgatattcaaatgacccaaagccctagctcccttagcgccagcgtcggagatagggtgactattacctgtcgcgcgtcccaggatgttaacaccgcagtggcatggtatcaacaaaagcctgggaaggcaccgaagctcctgatatactccgcatcgttcctctactctggtgtcccaagcaggttttcgggtagcagatccggaaccgattttactttgaccatctcgagccttcaacccgaagattttgcaacctattactgtcaacaacactacaccacgccacctacttttgggcagggtaccaaagtggaaatcaagagaactgtggccgcgccaagcgtgttcatctttcccccctccgacgaacagcttaagtcaggaactgcgtcggtggtgtgccttctgaacaacttctacccccgggaagcaaaggtgcagtggaaggttgacaatgcactgcagtccgggaactcccaagaatccgtgactgaacaagattcgaaggattccacttactcgctgtcgtcaactcttaccttgtctaaggccgattacgagaagcataaggtgtacgcatgcgaggttacccaccaggggctttcctccccggtgactaagagctttaacagaggagaatgc

SEQ ID NO: 15347 - DNA, 714 bp, synthetic construct
  misc_feature 1..714: note = source = /note="Description of Artificial Sequence: Synthetic coding sequence"
  source 1..714: mol_type = other DNA
atggctgtgatggcccctagaaccctggtgctgctgctatctggggcgctcgcgctaacacagacgtgggccgacattcagatgacgcagagtccgtctagcctgtctgcgagtgtgggggaccgggttactatcacctgtagagccagccaggatgtgaataccgctgtggcttggtaccagcagaagccaggaaaagccccaaagctgctgatctacagtgcgtcatttctctactcaggcgtaccctcacggttcagcggcagccgttccggtacagattttaccttaactatttcttctctccaacctgaggacttcgcaacttattattgtcagcagcattatacaacccccccgacctttgggcaggggactaaggtcgagataaagcgcactgtggcggctccctcagtcttcatctttcccccttccgatgaacagctgaaatccggcacagctagtgttgtctgtttgttaaataacttttatccaagggaagcaaaggtccagtggaaagtggacaatgccctccagtctggcaatagccaggaaagcgtcacggagcaggatagcaaagactccacttactccctcagtagtactcttacactcagcaaggctgactacgagaaacacaaagtgtatgcctgtgaggtgacccaccagggtctcagttcgccagtcaccaaaagttttaatcgaggcgaatgt

SEQ ID NO: 15348 - DNA, 714 bp, synthetic construct
  misc_feature 1..714: note = source = /note="Description of Artificial Sequence: Synthetic coding sequence"
  source 1..714: mol_type = other DNA
atggctgtgatggctccacgcacactggtactgcttctgagtggcgcactggccttgactcagacctgggccgacattcaaatgactcagagccctagctcactctccgcatctgtcggggaccgggtcacgatcacttgcagggcctctcaggacgtgaacacggcggtggcctggtatcagcagaaacccggaaaggcccctaaacttttgatttactctgctagcttcctgtattccggcgtgccgagtcgattctccggatcacggagcggcaccgacttcacactgaccatttcttcactgcagcctgaggatttcgctacttactattgtcagcagcactatacgacaccaccgaccttcggccagggaactaaagtggagattaaacgcaccgtggccgcccccagtgtgttcatattccccccgtccgacgagcagctaaagtcaggtactgcttctgttgtctgtttgctgaataacttttacccccgagaggcaaaagttcagtggaaggttgataacgctctgcagagtgggaacagtcaggagagtgtgaccgagcaggatagtaaggacagcacatacagcctctctagtacactcacccttagtaaagcagattacgaaaaacacaaggtgtatgcttgcgaagtcactcatcaaggcttgtcctctccagtgacaaaatcatttaacaggggcgagtgt

SEQ ID NO: 15349 - DNA, 714 bp, synthetic construct
  misc_feature 1..714: note = source = /note="Description of Artificial Sequence: Synthetic coding sequence"
  source 1..714: mol_type = other DNA
atggccgtgatggcaccccgaaccctcgtgctacttttgtccggcgccctagctctaactcaaacatgggccgatatccagatgacccagtctccttctagcctgtctgcttcagtcggagatcgggtgacaatcacatgccgggctagccaggatgtgaatactgccgtggcttggtaccaacagaagccaggcaaggcacctaaattgctgatctattctgcgtcctttctctactccggggtcccttcacggttttccggctcccgcagtggcaccgatttcacgctaaccatcagtagtctgcagcctgaggactttgccacctactattgccagcagcactacacgaccccacctaccttcggccagggtactaaagtggagatcaagaggaccgtcgcagcccctagcgtgtttatctttcccccctcggatgagcagctgaagagcgggacagcctccgtggtctgtctcctgaacaacttctacccacgagaggccaaggttcagtggaaggtcgacaatgctctccaatccggcaattctcaggagagcgttaccgagcaggacagcaaggacagcacgtacagtctatcaagcactctcaccctgtcaaaggcagactacgagaaacataaggtttatgcttgcgaagttacacatcagggactgagcagcccggtgacaaagtctttcaacagaggcgagtgc

SEQ ID NO: 15350 - DNA, 714 bp, synthetic construct
  misc_feature 1..714: note = source = /note="Description of Artificial Sequence: Synthetic coding sequence"
  source 1..714: mol_type = other DNA
atggctgttatggccccgaggaccctggtactactccttagtggcgcgctcgctcttacacagacctgggcggacattcaaatgacacaatctccgagtagcctgtcagcgtcggtcggtgatagagtgacgattacttgcagagcaagtcaagatgttaataccgcggtcgcatggtaccagcagaaacctgggaaggctccaaagctactgatctatagcgccagtttcctctacagcggtgtgcctagcaggttctccggaagtaggtcaggaacagatttcacactgaccattagcagcttgcaaccggaagacttcgcgacctattactgtcaacaacactataccactccacctaccttcggacaaggcacaaaggtggaaattaaacgaacggtcgcggctccctctgtcttcattttccctccaagcgatgaacaactcaaaagcggaactgcttcagtcgtgtgcctgctgaacaacttctatccacgggaagccaaagtgcagtggaaagtggataatgctctgcagtccggcaactctcaggaatcagtgacggagcaggattccaaggactccacctatagcctcagcagcactcttaccttgagcaaagcagactatgaaaaacacaaagtatacgcctgcgaggtcacccaccagggacttagtagccccgttactaagtctttcaacagaggggagtgc

SEQ ID NO: 15351 - DNA, 714 bp, synthetic construct
  misc_feature 1..714: note = source = /note="Description of Artificial Sequence: Synthetic coding sequence"
  source 1..714: mol_type = other DNA
atggcggtgatggctccgcggactctggttctgctgctgtcaggcgcgctggcccttactcaaacttgggctgatatccagatgactcaatcgccgtcaagcctgagcgcatcggtcggagatcgcgtcaccatcacttgccgggcatcccaggacgtgaataccgctgtggcgtggtatcagcagaagccgggaaaggccccaaagctgttgatctactccgcctcgttcctttactccggcgtgcctagccgctttagcggaagccggtccggaactgattttactttgaccatcagttcgttgcaaccggaagatttcgccacctactactgtcagcaacactacactactccgccgacttttggccagggcacgaaggtggaaatcaaacggactgtggccgcacccagcgtgtttatcttcccaccgtcagacgaacagcttaagtcagggaccgcgtccgtggtctgcttgctgaacaatttctaccctagagaggccaaggtgcagtggaaggtggacaacgccctgcaaagcgggaactcacaggaatccgtgaccgaacaggattcgaaggattcgacgtactcattgagctccactctgactctgtcgaaagcggactacgagaagcacaaggtgtacgcctgcgaagtcactcatcaaggcctgagctcaccggtgaccaaatcattcaataggggggagtgc

SEQ ID NO: 15352 - DNA, 714 bp, synthetic construct
  misc_feature 1..714: note = source = /note="Description of Artificial Sequence: Synthetic coding sequence"
  source 1..714: mol_type = other DNA
atggcagtgatggcacccagaaccttggtgctgctgttgtcaggcgcccttgccttgactcaaacctgggccgatatccagatgacacagtctccctcttctctctcagctagtgtgggagatagagtgacaatcacttgcagggcatcccaggatgtgaatactgcagtagcatggtatcaacagaagcccggcaaggctcctaagctgctgatctactccgcaagtttcctgtactccggcgtgccatctaggttcagtggatcaaggagtggcacagattttacccttaccatttcctcactgcagcctgaggacttcgctacttactattgccagcagcactacaccactcccccaacattcggccagggaactaaggtcgaaatcaagcgtactgtggccgcccccagtgtgttcattttcccaccttctgatgagcaactcaagtccggcaccgccagtgtagtctgcctgctgaacaacttctatccaagagaagccaaagttcaatggaaggtggataatgctctgcagtctggcaactcacaggagtcagttactgaacaggacagtaaagactccacttattccttgtcatcaaccctgacactgtccaaggcagactacgaaaaacacaaggtgtacgcttgcgaggtcacacatcagggcttgagttcccccgtgactaagtccttcaacagaggtgagtgc

SEQ ID NO: 15353 - DNA, 714 bp, synthetic construct
  misc_feature 1..714: note = source = /note="Description of Artificial Sequence: Synthetic coding sequence"
  source 1..714: mol_type = other DNA
atggctgtgatggcacctcggactctggttttgctcctgtccggagctctcgcgctgacacagacatgggccgacatccagatgactcagtctccctctagtctgagcgcctccgtcggcgatagggtgactatcacctgtcgagcctcacaagacgtgaacaccgccgtcgcctggtatcagcagaagcctggcaaagcccctaaattgcttatctactcagcctcattcctgtactccggcgtgccctcgcggttcagcggtagcagatcagggacggacttcactttgacaatctcttccctgcagcccgaggacttcgccacgtattattgtcagcagcattacacaactccccctacattcggccaaggcactaaggtggagatcaagcgcacagtcgcggccccttcagttttcatatttcctcccagtgatgaacagttgaagagtggtaccgcctctgtcgtgtgtctgctgaataatttctatcccagagaggccaaggttcagtggaaagtggataacgcactgcaatcagggaactcgcaggagtctgtgactgaacaagactcaaaggattcaacgtatagcctgtcctccactttgacactatcaaaggcagactacgaaaagcataaggtttatgcctgcgaagtcacacatcaggggttaagtagccccgtgacaaaatcctttaataggggggaatgt

SEQ ID NO: 15354 - DNA, 714 bp, synthetic construct
  misc_feature 1..714: note = source = /note="Description of Artificial Sequence: Synthetic coding sequence"
  source 1..714: mol_type = other DNA
atggccgtgatggccccacgcacgttggtgttgctcctgagcggagccctcgccctgacccaaacgtgggccgacatccagatgactcagagcccgtcctcgctgtccgcctccgtcggtgaccgcgtgaccattacgtgtcgagcatcccaagatgtgaacactgctgtggcatggtaccagcagaaaccgggaaaggctccgaagctcctgatctacagcgcctcatttctgtactcaggagtcccatcgaggttctcgggctcgcggtcaggaactgactttaccctgactatctcgtccctccaaccggaagatttcgcaacctactactgccagcagcactacactacgccacctacctttggacaaggcaccaaggtggagatcaagcggaccgtggccgcaccatcggtgttcatctttccgccgagcgatgagcagttgaaaagcggaaccgcatcagtcgtctgcttgctgaacaatttctacccgagagaggctaaggtccaatggaaagtcgacaacgcgttgcaatccggcaatagccaggagtcggtgaccgagcaagactcaaaggactccacctactcgctgagcagcaccctgacgctctccaaggcagactacgaaaaacacaaggtctacgcctgtgaggtgactcatcaagggctgtcctctccagttactaagtcattcaatagaggcgagtgt

SEQ ID NO: 15355 - DNA, 714 bp, synthetic construct
  misc_feature 1..714: note = source = /note="Description of Artificial Sequence: Synthetic coding sequence"
  source 1..714: mol_type = other DNA
atggccgtgatggcacctcgcaccctggtgctcctgctcagcggagccctcgcgctgactcaaacctgggcagatattcaaatgacgcagtcccccagctctctctctgctagcgtcggtgaccgcgtgaccattacttgtcgggccagccaggatgtcaataccgcagtggcatggtaccaacagaaacccgggaaggcaccaaagctgctcatctactcagcgtcctttttgtactccggtgtgcctagccgttttagcggttcccgctctggaaccgacttcacccttaccatttcatcccttcaacctgaagattttgcaacctactactgtcagcaacactacactactcctccaacttttgggcagggcactaaggtcgagatcaagcggaccgtcgcagcgccgtcagtgttcatttttcccccaagcgatgaacaacttaagagcggcactgcaagcgtggtctgccttctgaacaacttctaccctcgggaagccaaggtgcaatggaaagtggacaatgctctccagtccgggaactcccaggagtcggtgactgagcaagattcgaaggacagcacgtattcgctttcctccacgctcactctctcgaaagcggattacgaaaagcacaaggtgtacgcttgtgaagtgacccaccaagggctgtcctccccagtcaccaagtcatttaacagaggagagtgt

SEQ ID NO: 15356 - DNA, 714 bp, synthetic construct
  misc_feature 1..714: note = source = /note="Description of Artificial Sequence: Synthetic coding sequence"
  source 1..714: mol_type = other DNA
atggcagtgatggcccccagaacgttggtgctgctgctctctggggcactggccctgacccaaacttgggcagatatacaaatgactcaatccccttcgtcactgtcggcgtcggtaggggaccgtgtgactattacctgtcgagcttctcaggacgtgaatactgcggtcgcatggtaccaacagaaaccaggtaaggctccaaagctgctcatttactccgcctcttttctttacagcggagtcccctcccgttttagcggatctcgcagcggaaccgactttactctcaccatctcgtcgctccaaccagaggatttcgcgacctactactgtcagcaacattacacgactcctcctacttttggacagggaaccaaggtggaaatcaaacgtaccgttgcggccccgagcgtgttcatctttccaccctcagatgaacagctgaaatcaggcactgcgtcggtcgtgtgcctgcttaacaatttctacccaagagaggcaaaggtgcaatggaaagtggacaacgcacttcaatcgggcaattcgcaggaaagcgtgaccgaacaagattccaaggattcaacttactcgctttcctcaacccttaccctttcgaaggccgactatgagaaacacaaggtgtacgcatgcgaggtgacccatcaaggtctttcttcacctgtcaccaagtcgttcaaccgaggtgagtgt

SEQ ID NO: 15357 - DNA, 714 bp, synthetic construct
  misc_feature 1..714: note = source = /note="Description of Artificial Sequence: Synthetic coding sequence"
  source 1..714: mol_type = other DNA
atggcagtgatggcaccccggacattagtcctcctgctatctggagcattagccctcacacagacatgggccgatatccagatgacacagtcaccctcatctttgtcagcatctgtcggagatagggtcactataacatgcagagcatctcaggatgtaaatacagctgttgcctggtatcagcagaaacccgggaaagcacccaaactgctgatctacagtgccagttttctatacagtggggttccatcacgattttcgggatcgcgatccggaacagatttcacactcacaatttcctctttacaaccagaggactttgctacatattattgccagcagcactatactactcctccaacgttcggacagggaacaaaagttgaaataaaaaggacagtggcagcaccctccgtgtttatctttccaccttccgatgagcagctgaaatctggaactgcatccgttgtttgtctcctgaacaatttctatccaagggaagcaaaagtgcagtggaaagtagacaatgccctccaatcaggaaatagtcaggaaagtgtcacagaacaggattcaaaagactccacttactctctgtccagtactcttactctgtcaaaagccgattatgaaaaacacaaggtttatgcctgcgaagtgacacatcagggactgtcttcaccagtcacgaaatccttcaatcggggagaatgt

SEQ ID NO: 15358 - DNA, 714 bp, synthetic construct
  misc_feature 1..714: note = source = /note="Description of Artificial Sequence: Synthetic coding sequence"
  source 1..714: mol_type = other DNA
atggctgtcatggccccgcgcaccctggtccttctcctgagtggggcgcttgctctcactcagacctgggccgacatccaaatgacccaatctccatcctccctctcggcatcggtgggtgaccgcgtcactatcacctgccgggcttcccaagacgtgaacactgccgtggcctggtaccaacaaaaaccaggcaaagccccgaaattgctcatttactcggcgagcttcctgtacagcggagtgccatcccggttctcaggaagccgcagcggaaccgatttcactctgaccatttcatcgttgcagccggaggacttcgccacctactattgtcagcagcattacactaccccgccgactttcggacagggaacgaaagtggagatcaagcgcaccgtcgcagccccgtcggtgttcatcttccctccgtccgatgaacagctgaagtcaggcactgcgtcagtcgtgtgcctgctgaacaacttctacccgcgggaagcgaaggttcaatggaaagtcgacaacgcgctgcagtcgggtaactcacaggaatcagtgactgaacaagactctaaggactcaacctacagcctctcgtccaccctgactctgagcaaggccgattacgaaaaacataaggtgtacgcctgcgaagtcacgcatcagggactgtcgtcgccggtgaccaaatccttcaaccggggcgaatgt

SEQ ID NO: 15359 - DNA, 714 bp, synthetic construct
  misc_feature 1..714: note = source = /note="Description of Artificial Sequence: Synthetic coding sequence"
  source 1..714: mol_type = other DNA
atggccgtgatggctccgcgcaccctcgtcctgttgctgtcgggagcactggcattgacccagacctgggccgacatccagatgacccagtcgccgtcgagcctgtcggcatccgtcggcgaccgcgtgactatcacctgccgcgcctcccaagatgtgaataccgctgtcgcgtggtaccaacaaaagccggggaaagcaccaaagctcctgatttactccgcgtccttcctctatagcggcgtgccgtcgcggttctctggatcccgctctggcactgatttcactctgactatcagctcactgcagccagaggacttcgccacctactactgtcaacagcactacactacgccgccgaccttcggacagggtaccaaggtggaaatcaagcgcacggtcgccgccccctcggtgtttatcttcccaccttccgatgaacagctcaaatccggcaccgcatcagtcgtctgtctgctgaacaatttctacccgagggaagctaaagtgcagtggaaagtggacaacgcactgcaatcgggaaactcacaagaatcggtgaccgagcaagactccaaggacagcacctactcgctttcatcgacccttaccctgtcgaaggcggattacgagaaacataaggtgtacgcttgtgaagtcacgcatcagggcctcagctcgccggttaccaaatcctttaaccggggagagtgc

SEQ ID NO: 15360 - DNA, 714 bp, synthetic construct
  misc_feature 1..714: note = source = /note="Description of Artificial Sequence: Synthetic coding sequence"
  source 1..714: mol_type = other DNA
atggcagttatggcaccccgtactttggttttactcttgtccggtgctcttgctttaacgcagacctgggctgatattcaaatgacccagtcgccgagctctctgtcagcctctgtgggcgacagggtcactattacctgcagagcatctcaggacgtaaacactgcagtcgcttggtaccagcagaaaccaggcaaagcgccaaagctgttgatttactccgcttcattcctctattcgggtgttccatctaggttttctggttctaggtcaggcaccgatttcacactcacaatctctagtctccaaccagaagattttgcaacgtattactgccaacagcattacacaacacccccgactttcggtcagggaacaaaggttgaaattaagcgtactgttgcagcaccttccgtatttatttttcctccatcagatgagcaacttaaatcgggtactgcttccgttgtgtgcttgctgaacaatttctatccgcgtgaagccaaagttcagtggaaagtggataacgcactacaatcaggtaacagtcaagaatctgttactgagcaagattctaaggattctacgtactctctctcatctactcttacgttgtctaaggctgattacgaaaagcataaagtttacgcgtgcgaggtaactcatcaggggttgtcaagtcctgtcaccaaaagttttaatcgtggtgagtgc

SEQ ID NO: 15361 - DNA, 714 bp, synthetic construct
  misc_feature 1..714: note = source = /note="Description of Artificial Sequence: Synthetic coding sequence"
  source 1..714: mol_type = other DNA
atggcagtcatggcgcctcggactctcgtgctgctgctctccggcgctctcgctcttacgcaaacctgggcggatatccagatgacccaatccccaagcagcctctcagccagcgtcggagacagggtgacgatcacctgccgtgcgtcccaggacgtgaacactgcggtcgcctggtaccaacagaagccggggaaggccccaaagctgctcatttacagcgcgtcatttttgtactcgggagtgcctagcaggttctccggaagcagatccggcacggatttcaccctgactatctcatcgctccaacctgaagatttcgccacctactactgccagcagcactatactactccgccgactttcggtcagggaaccaaagtcgagatcaagcgcaccgtggcggcgcctagcgtctttatctttcccccctcggatgaacagctcaaatcgggcactgcttcagtcgtgtgcctcctgaataacttttacccaagggaggccaaggtccagtggaaagtggacaacgcccttcaatccggtaatagccaggagtccgtgaccgagcaggacagcaaggacagcacttactcgctcagctccaccctgaccctctcaaaggccgattacgaaaaacataaggtttacgcctgcgaagtgactcatcagggactttcatccccggtgactaagtcgttcaatcgcggagaatgt

SEQ ID NO: 15362 - DNA, 714 bp, synthetic construct
  misc_feature 1..714: note = source = /note="Description of Artificial Sequence: Synthetic coding sequence"
  source 1..714: mol_type = other DNA
atggccgtgatggccccccgaactctagtactccttctgtccggcgccttggccctcacccagacctgggcggatattcaaatgacacagagcccgtcttcactctccgcatcagtgggcgatcgagtcacgatcacctgccgggcctcccaagacgtgaacacggcggtggcatggtaccagcagaagcctggcaaagcaccaaaacttttgatatattccgcatcctttctgtacagcggcgttcccagcaggtttagtggttctagaagcggaaccgatttcacacttaccatctcctcactgcaacctgaggattttgccacctactactgtcaacaacattacaccacccctccgacattcgggcagggtacgaaagttgagatcaagcgaacagtagccgcaccatccgtcttcattttccccccttcggacgagcaattgaaaagcggtacagccagcgtagtgtgcctgttgaataacttctatcccagggaagcgaaggttcagtggaaggtggataacgcactgcaatctggtaattcccaggaatccgtgactgagcaggacagtaaggattccacttactcgctgagcagcacactgacattatcaaaagccgattatgagaaacacaaagtatatgcgtgcgaagtgactcatcaaggattgtcctctcccgtcactaagtcctttaatcggggtgagtgc

SEQ ID NO: 15363 - DNA, 714 bp, synthetic construct
  misc_feature 1..714: note = source = /note="Description of Artificial Sequence: Synthetic coding sequence"
  source 1..714: mol_type = other DNA
atggcggtgatggcgcccagaactctcgtgctgttgctttccggagcccttgctctcactcaaacctgggcagacatccagatgacccagtctccctcatcgttgtctgcctctgtcggagacagggtcactatcacttgtcgggcatcccaggacgtgaacactgccgtggcatggtaccaacagaagccaggaaaggccccaaaacttctcatttactccgcgtcctttttgtactcgggtgtgccgagccgcttcagcggttcgcggagcgggacggatttcaccctgactatctcatcgctgcaaccagaagatttcgccacttactactgccagcagcactacacgaccccgccgaccttcggccaaggaacgaaggtggagatcaagcgcactgtggcagccccatcggtgttcatctttccgccgtcggacgaacagcttaagtccggaactgcttcagtcgtttgccttctgaataacttctatccgcgtgaggccaaggttcagtggaaggtcgataacgctttgcagagcggtaattcgcaggagtcggtcaccgaacaagatagtaaagactcaacctacagcctgagctcaaccctgactcttagtaaggcggactacgaaaaacacaaggtctacgcgtgcgaagtgacccatcaaggcctctcttcccctgtgaccaaaagttttaaccggggcgagtgc

SEQ ID NO: 15364 - DNA, 714 bp, synthetic construct
  misc_feature 1..714: note = source = /note="Description of Artificial Sequence: Synthetic coding sequence"
  source 1..714: mol_type = other DNA
atggcagtcatggcgcctcggactctggtgctgctcctgtctggagcgcttgcccttacccagacgtgggccgacattcagatgacccagtccccgtcatccttgtcggcatccgtgggagatagagtgaccatcacctgtcgcgcatcgcaggatgtcaataccgccgtggcctggtaccaacagaagccgggcaaggccccaaagctgctgatctactcagcgtccttcctctacagcggggtgccttcgcgcttttcgggcagccgatcgggaactgacttcacgctgaccatcagctctctccaaccagaagatttcgcaacttattactgccaacaacactacactactccgccgacctttggacagggtaccaaggtcgagatcaagaggaccgttgctgccccctcagtgtttatcttcccgcccagtgatgaacaactcaaatccggcacggcttcggtcgtttgcctgctgaataacttctacccacgggaggccaaagtgcagtggaaggtcgacaacgctctccagtcaggaaactcacaggagtcggtgactgaacaggactcgaaggacagcacctactcactgagctcgactctgactttgtccaaggccgactacgaaaaacacaaagtgtacgcgtgcgaagtgactcatcaaggactctcctccccggtgaccaagagcttcaaccgcggggagtgc

SEQ ID NO: 15365 - DNA, 714 bp, synthetic construct
  misc_feature 1..714: note = source = /note="Description of Artificial Sequence: Synthetic coding sequence"
  source 1..714: mol_type = other DNA
atggctgttatggccccccggactctcgtactcctcttgagtggcgcactcgctcttactcagacttgggctgacatccagatgacacaaagcccatcttccctcagtgcctcagttggagatcgagtaaccattacctgtcgcgcgtcgcaggacgtcaacactgcggtcgcctggtaccaacagaagcctggcaaagctccgaagctactcatttactctgcgtccttcctctactcaggggttccgtcacgctttagcggctccagatctggcaccgattttactctcacaatcagttctctccagcctgaagacttcgctacgtactactgccagcagcactacaccacgcctccaacgttcggacaggggaccaaggtcgagatcaagcggaccgtggctgcaccctcagttttcatattccctcccagcgatgagcagcttaagagcggtacggcttccgtagtttgtcttctaaataatttttatccacgggaagccaaggtacagtggaaagtcgacaacgcacttcaatcaggcaactctcaagaatctgtaaccgaacaggattccaaagacagcacctacagtctctcttctaccctgacgctgagtaaagcagactacgaaaaacacaaggtgtacgcctgcgaggtgacccaccagggactgtcctcccccgttacaaagtcattcaataggggcgagtgc

SEQ ID NO: 15366 - DNA, 714 bp, synthetic construct; identical to SEQ ID NO: 15316
  misc_feature 1..714: note = source = /note="Description of Artificial Sequence: Synthetic coding sequence"
  source 1..714: mol_type = other DNA

SEQ ID NO: 15367 - DNA, 714 bp, synthetic construct
  misc_feature 1..714: note = source = /note="Description of Artificial Sequence: Synthetic coding sequence"
  source 1..714: mol_type = other DNA
atggccgtgatggcacctcgaaccctggtgctgctcctgtccggtgccctcgccttgactcaaacctgggcagatatccagatgacccaatccccatccagcttgagcgcatccgtgggggacagagtgaccattacgtgcagggcgtcccaagatgttaacactgcagtggcctggtaccagcaaaaaccaggaaaggcacccaagctgctcatttacagcgcatcatttctttactctggggtcccaagcagattttccggtagcagaagcggcacggactttacgctcaccatctcgagcctgcagcccgaagattttgcaacttattactgtcagcagcactacaccacccctccaaccttcggacagggaaccaaagtggaaatcaaaagaacggtggcagcaccctcagtgttcatcttcccgccttcggacgaacaacttaagtcgggtaccgcatcagtggtctgcttgcttaacaacttctacccgagagaggcaaaggtgcaatggaaggtcgacaacgctctgcagtccggaaattcccaagagtcggtgacggagcaggacagcaaggatagcacctactccctgtcatccactcttactctgtcaaaagcggattatgaaaagcataaggtctatgcttgtgaggtgacccatcaaggacttagctctcctgtgactaagtcgtttaaccggggcgaatgt

SEQ ID NO: 15368 - DNA, 714 bp, synthetic construct
  misc_feature 1..714: note = source = /note="Description of Artificial Sequence: Synthetic coding sequence"
  source 1..714: mol_type = other DNA
atggccgtcatggccccgagaacccttgtcttgctcttgtcgggagcgcttgcgctgacccaaacttgggcagacatccaaatgactcagtcaccaagctcgctgtcagcatctgtgggagatcgcgtgactatcacctgccgcgccagccaggacgtgaacaccgcagtcgcatggtaccaacaaaaaccaggaaaagccccgaagttgctgatctactccgcatctttcctgtactcgggcgttccatcccggttttcgggatctcgaagcggtactgacttcactctcaccatctcgtcgctgcagccggaggacttcgccacctactactgtcaacagcactacactactccccccacctttggacagggaaccaaagtggagatcaagaggacggtggcggcgccttcagttttcatcttccccccgagcgatgaacaactgaagtctggcacggcttcagtcgtgtgcctcctcaacaatttctatcctcgcgaggccaaggtgcagtggaaggtcgataatgccctccagtctggtaactcgcaggagtccgtcaccgagcaggactcaaaggactcgacttactcgctctcctccactctgactctgagcaaggccgactacgagaagcacaaggtgtacgcgtgtgaggtaactcatcagggtttgtcgagcccggtgactaagtcgtttaacagaggcgaatgc

SEQ ID NO: 15369 - DNA, 714 bp, synthetic construct
  misc_feature 1..714: note = source = /note="Description of Artificial Sequence: Synthetic coding sequence"
  source 1..714: mol_type = other DNA
atggccgtcatggcacctagaacccttgtgctgctcttgtctggagccctcgcccttacgcagacctgggcggacatacagatgacccaatcaccttcatcgctgtccgcatcggtgggggaccgtgtcaccatcacctgtcgcgcaagccaggatgtgaatactgcagtggcttggtaccagcagaagccgggtaaggcaccgaaactcttgatatactccgcatcctttctttactcgggcgtgccttcccggttttcgggttcccggtcggggaccgactttaccctgaccatatcttcgctgcaaccggaagatttcgcaacttactactgtcaacaacattacactactccccctaccttcggtcaaggaaccaaggtggagattaagcgaaccgtggcagcaccatccgtctttatcttcccaccatccgatgaacaactcaagtcaggcactgcaagcgtggtgtgtctcctgaacaacttttaccccagggaagccaaggttcaatggaaggttgataacgcccttcagtcgggcaattcccaagagagcgtgaccgaacaagactcaaaggattccacctacagcctcagcagcactctgaccctctcaaaggcggattatgagaaacacaaagtgtacgcttgcgaagtcacccatcaaggcctgtcgtcccccgtcactaagtcgtttaacagaggagaatgc

SEQ ID NO: 15370 - DNA, 714 bp, synthetic construct
  misc_feature 1..714: note = source = /note="Description of Artificial Sequence: Synthetic coding sequence"
  source 1..714: mol_type = other DNA
atggcagtcatggctccgcgtactctcgttctgttgctcagtggtgccctggccctgactcagacgtgggctgacatacagatgacacagtcaccaagttctcttagcgcgtccgtaggcgaccgagtgacaatcacgtgcagagctagccaggatgtaaacacagccgtggcctggtaccagcaaaagcccggcaaggcacccaagctgttaatatactctgccagttttctgtactccggagtgccatctcgcttcagcggctcccggtctggcaccgactttaccctcaccatcagcagccttcagccagaggacttcgccacttactactgtcagcagcactacactactccccctaccttcggtcagggcactaaggtggagattaagagaactgttgcagcaccttcagtgtttattttccccccatctgacgaacaactgaagtccgggacagcttcggtcgtgtgtctgctgaacaatttttacccgcgggaagcaaaagtgcagtggaaggtcgacaatgccctgcaatctggaaacagccaggagtcagtcaccgagcaagatagtaaggactcaacctacagcctgagcagcaccttgacgctgtcaaaggctgattatgagaaacacaaggtttacgcctgtgaggtcacacatcagggattgtcgagtccggtcactaagtcgttcaacaggggagagtgc

SEQ ID NO: 15371 - DNA, 714 bp, synthetic construct
  misc_feature 1..714: note = source = /note="Description of Artificial Sequence: Synthetic coding sequence"
  source 1..714: mol_type = other DNA
atggcagtgatggctccccggacgctcgtcctgctgcttagtggagccctcgccctgacacaaacctgggccgatattcagatgacccagtccccttctagcttgagcgcctccgtgggcgatagggtcaccattacctgtcgcgcctcgcaggacgtgaatacagcagtggcttggtatcagcagaaacctggaaaagctcccaagttactgatctattctgcctctttcctgtactctggcgtgccgtcccggtttagtggttcccgcagcgggacagactttactctgacgattagttccctgcagccagaagacttcgctacgtattattgtcagcagcattacaccacgccacctacttttggtcaagggaccaaggttgaaatcaagcggactgtggcagctcctagcgtttttatttttcccccctctgacgagcaacttaaatctgggacagcttctgtggtttgtctactgaacaatttttacccacgggaggctaaagtgcagtggaaggtggacaatgcactgcaatccggcaactcccaggagtccgtcactgagcaggactctaaggactctacctatagcctatcctctaccctgactctctccaaggcggattacgaaaaacataaggtgtatgcatgcgaggtgacccatcaaggactgtccagccccgtgaccaagtcctttaaccgcggggaatgt

SEQ ID NO: 15372 - DNA, 714 bp, synthetic construct
  misc_feature 1..714: note = source = /note="Description of Artificial Sequence: Synthetic coding sequence"
  source 1..714: mol_type = other DNA
atggccgtcatggcccctagaactctcgtcctgttgctttccggcgccctggccctgacgcaaacttgggctgacatccagatgacccagtcgccgagctcgttgagcgcaagcgtcggcgaccgcgtcacgatcacttgccgggcctcacaagacgtgaacactgccgtcgcatggtaccagcagaagccgggaaaggcgcctaaactgctgatttacagtgctagctttctgtactcaggtgttccatcgaggttctcaggatcccggagcggcacggacttcaccctgaccatctcatcactgcagccggaagacttcgcaacctactactgtcaacaacactacaccactccgccgacctttggccagggaacgaaggtcgaaattaagcgtaccgtggcggccccgagcgtgttcattttcccgccatcagacgaacagctgaagtccggaactgcatccgtggtgtgcctgctcaataacttttaccctagggaggctaaagtccaatggaaggtggataatgcgttgcagtcggggaactcgcaagagtccgtcactgagcaagatagcaaagacagcacctactcgctgtcatcgactctcactctgtcaaaagcggattacgagaagcacaaagtgtatgcctgcgaggtcactcaccagggactgtccagcccggtgaccaagtcgttcaatcgcggagagtgc

SEQ ID NO: 15373 - DNA, 714 bp, synthetic construct
  misc_feature 1..714: note = source = /note="Description of Artificial Sequence: Synthetic coding sequence"
  source 1..714: mol_type = other DNA
atggcggtgatggcgcctcgcacgctcgttctcctgttgtcgggagccctcgcacttactcaaacctgggccgatatccaaatgacccagagcccatcgtccctgtccgcatcggtcggagacagagtcaccattacctgtagggcatcccaagacgtgaacacggcagtggcatggtaccagcagaagccaggcaaggcacccaagctccttatctacagcgcatcttttctttactcgggtgtgccctccaggttctccggcagccgatccgggacggatttcaccctgaccatttcgtcactgcaacctgaagattttgcgacttactactgccaacaacactacactactccacctacctttggacaaggaactaaggtggaaatcaaaagaaccgtcgcagcaccttcggtgttcatcttccccccatcagacgaacaattgaaaagcgggaccgcctcagtggtctgccttctgaacaatttctacccaagggaggcgaaagtgcaatggaaggtggataacgcacttcaatcgggcaacagccaagaatccgtgactgagcaagattcgaaggactccacttactcactctcttccacgctgactctgtcgaaggccgattacgagaagcataaagtctacgcatgtgaagtgactcaccagggactttcgtcgccagtcaccaagtcgttcaatcgcggtgaatgt

SEQ ID NO: 15374 - DNA, 714 bp, synthetic construct
  misc_feature 1..714: note = source = /note="Description of Artificial Sequence: Synthetic coding sequence"
  source 1..714: mol_type = other DNA
atggcagtcatggccccacggactctcgtactgctactgagcggcgctctagccctgacacagacgtgggcggacattcagatgacgcaatcccctagcagtctttccgcctcagtgggagaccgggtgactattacatgcagagcttcccaggacgttaacacggcagtggcttggtaccagcagaagccaggcaaggctcctaaactgttgatttactctgcctccttcctctactcaggcgtcccctccagattcagtggttcgagatccggaaccgactttactctgaccatatcctccctccagcctgaagatttcgccacctactactgccaacagcactacacaacacctccgacttttggtcaggggacaaaggtggagataaagaggacggtagctgccccaagcgtgttcatctttccaccatctgatgaacaactgaaaagcggcaccgcttcagtggtctgtctgctcaataacttttatcctagggaagccaaagtgcaatggaaggttgataacgccctacagagcggtaactcccaggagtccgtcacggaacaggattctaaggattctacatactccttatctagcacgctgacattgtcgaaggcagattacgaaaaacataaggtctacgcgtgcgaagttacccaccaggggctgtcgagccccgtgacgaagtccttcaacagaggcgagtgt

SEQ ID NO: 15375 - DNA, 714 bp, synthetic construct
  misc_feature 1..714: note = source = /note="Description of Artificial Sequence: Synthetic coding sequence"
  source 1..714: mol_type = other DNA
atggctgtcatggccccgcgcacactggttctgttgctctcaggtgcgctcgctctgacccagacatgggccgacattcagatgacccagagccccagctctttatcagcaagcgtgggcgaccgtgtaaccattacatgccgggccagccaggatgtcaataccgccgttgcgtggtaccagcagaagccaggcaaagccccaaagcttctcatatacagtgcaagcttcctctactccggtgtcccgtcacgatttagtggaagccgcagcggcactgattttactctgacaattagttccttgcagcccgaggattttgctacttactactgccagcagcattatacaaccccaccaacattcgggcaaggtactaaggttgaaatcaagcggacggtggccgccccctcagtgttcatctttcctccatccgatgagcagctaaagagcggcactgcctcggtggtgtgccttctgaataacttctacccacgggaggccaaggtgcagtggaaagttgataacgccttgcagagtggcaatagccaggagtcagtgacagaacaggacagcaaggactccacatactccctctcaagtactcttactctcagcaaggccgattatgaaaagcataaggtgtacgcatgcgaggtcacccatcaaggtctaagttcccccgtgaccaaatccttcaacagaggagaatgc

SEQ ID NO: 15376 - DNA, 714 bp, synthetic construct
  misc_feature 1..714: note = source = /note="Description of Artificial Sequence: Synthetic coding sequence"
  source 1..714: mol_type = other DNA
atggccgtgatggctccgaggactctggtgctcctgctgtcaggggccctggcgctgactcagacttgggccgatatccaaatgacccaaagcccaagctccctgtccgcgtcagtgggggacagggtgacgattacctgccgggcttcacaagacgtgaacaccgcggtggcctggtaccagcagaaacccggtaaggcgccaaagctgcttatctacagcgcctcgttcctgtactccggcgtgccaagccgcttttcgggaagccggtcgggtaccgacttcaccctgactatcagcagcctgcagcccgaggactttgctacctactactgtcaacaacactacaccaccccgcctacgttcggacagggaacgaaggtggaaatcaagcggaccgtcgcagcaccgtctgtgttcatcttcccgccatcggatgaacaactgaaatccgggactgcttcagtggtctgcctgttgaacaacttctacccgcgagaagctaaggtccaatggaaggtggacaatgcgctccagtcgggcaactcgcaggaatcagtgacggaacaggacagcaaagactcaacttactcacttagctccaccctgaccctctccaaggcggactacgagaagcataaggtctacgcgtgcgaggtgactcaccagggccttagctcccctgtgactaagtcgttcaaccggggtgaatgc

SEQ ID NO: 15377 - DNA, 714 bp, synthetic construct
  misc_feature 1..714: note = source = /note="Description of Artificial Sequence: Synthetic coding sequence"
  source 1..714: mol_type = other DNA
atggcagtgatggcaccccggaccctcgtgctgcttctgtcgggcgcactggccctcacccagacttgggcagatattcaaatgacccagagcccgtcgtccctttcagcatcagtcggggaccgggtgacgatcacctgccgggctagccaagacgtcaacaccgccgtggcctggtaccaacagaaaccagggaaggcacctaagctgctgatatactcagcgagctttctgtactctggagtgccatcacgtttttctggctcgcgcagcgggactgatttcaccctcactatttccagcctgcaacccgaggatttcgcgacctactactgccaacaacattacaccactccccctacttttggtcaaggaactaaagtggaaatcaagagaacggtggcagcaccgtcggtattcatttttcccccttccgatgaacagctgaagtccggaaccgcgtcggtggtctgtctgctcaataacttctatccacgggaggcaaaggtccagtggaaggtggacaacgcactgcagagtggaaatagccaggaatcagtcactgaacaagattcaaaggattcgacttattcgctgtcctcgactctgaccctgagcaaggcagattacgagaagcataaggtctacgcctgtgaagttacccatcaagggttgagctcacctgtgactaagtcgtttaacaggggagagtgc

SEQ ID NO: 15378 - DNA, 714 bp, synthetic construct
  misc_feature 1..714: note = source = /note="Description of Artificial Sequence: Synthetic coding sequence"
  source 1..714: mol_type = other DNA
atggccgtcatggcaccaagaacgctggtgcttctgctgagcggtgctctcgctctgacccagacctgggcagatattcaaatgacccaatcgccgtcctccctttccgctagcgtaggtgaccgtgttaccattacctgtagagcgtcgcaggatgtcaacacggcggtggcctggtaccaacagaaacctgggaaggcacccaaactgctgatatactcggcgtcttttctgtactccggcgtgccctcaagattcagcggatcgcgatctggaaccgacttcaccttgacgatatcctcactgcagcccgaagattttgcaacttactattgtcaacaacattatacgactccacctacttttgggcaaggaaccaaggtggagattaagcggactgtggctgcaccttctgtgttcatattccctccttcagacgaacaactgaagtcaggcaccgcaagcgtggtctgccttctgaataacttttacccaagagaagcgaaggtccagtggaaggtcgacaacgccctccaaagcggaaattcgcaggagtcagttactgagcaggattcaaaggattcgacttactccctgtcctccactcttactctgtcgaaggcagattacgaaaaacacaaggtctatgcctgcgaagtgacccatcagggactctcgtcccccgtgaccaagtcgtttaaccgtggggaatgc

SEQ ID NO: 15379 - DNA, 714 bp, synthetic construct
  misc_feature 1..714: note = source = /note="Description of Artificial Sequence: Synthetic coding sequence"
  source 1..714: mol_type = other DNA
atggccgtgatggcgccgagaacgttggttctgctgcttagcggtgccctcgcattgacgcagacctgggccgacatccaaatgacacaatctccttcctcactcagcgcctccgtcggtgaccgagtcactatcacttgtcgagcaagtcaggacgtcaataccgcagtcgcttggtaccaacaaaaacctggaaaagctcccaagctcttgatctattctgcctccttcttatattccggagtaccctccaggttcagcgggagccggagcggcaccgacttcaccttaacgattagttcactccaacctgaagacttcgccacctactattgccaacagcattacaccacgccacccacgtttggccagggtacaaaggttgaaataaaacggaccgtcgcagcaccgtcggttttcatttttcctccttctgatgaacagttgaagtccggcaccgcgtcagtcgtgtgcctactaaacaacttctacccacgggaagctaaagtccaatggaaggtggataacgcacttcagagtggcaactctcaggaatccgtcacagagcaggactctaaagacagcacctattctctatctagtactcttacgctgtctaaagccgactatgaaaagcacaaggtatatgcctgcgaggttacacatcaaggcttatcaagtcccgtaacgaaatccttcaaccgtggggaatgc

SEQ ID NO: 15380 - DNA, 714 bp, synthetic construct
  misc_feature 1..714: note = source = /note="Description of Artificial Sequence: Synthetic coding sequence"
  source 1..714: mol_type = other DNA
atggctgttatggcaccacgtacgctcgtgctgctactgagtggagccctggctctgacacaaacttgggctgatatccagatgacacaatcgcccagttcgctaagtgcctcagtgggggatcgtgtcactatcacttgccgagcgagtcaagacgtgaatacagcggttgcctggtaccagcaaaagcccggcaaggccccgaagctgttgatctatagcgcgagcttcctatactccggtgtcccatcacgcttcagtggatcccgttctggtactgatttcacacttaccatttcctctctgcagccggaagatttcgccacttactattgtcagcagcattataccacccctccgacgttcggccagggaaccaaggtcgagattaaaagaacggtcgctgccccgtcggtattcatttttccgccgagtgacgagcaattgaagagcggcacagccagtgtggtgtgcttgctgaacaatttctacccgcgtgaggcaaaggtgcagtggaaagtcgataatgcgttgcagagtggaaactcccaggagtcagtcacagagcaggacagcaaagactctacgtactcactgtcgtccacacttacgctgtctaaggccgattacgagaaacataaggtttacgcatgcgaggttacccaccagggcttatcgagccccgtgacgaagagcttcaaccgaggcgagtgc

SEQ ID NO: 15381 - DNA, 714 bp, synthetic construct
  misc_feature 1..714: note = source = /note="Description of Artificial Sequence: Synthetic coding sequence"
  source 1..714: mol_type = other DNA
atggcagtgatggcacctagaactcttgttctgcttctgtccggtgcacttgcactgacccagacttgggcggatattcaaatgacccagagcccttcctcgctctcggcttccgtgggtgaccgggtcaccattacttgtcgcgcgtcccaggatgtgaacactgcagtggcctggtaccaacagaaaccaggaaaggcaccaaaactgctgatctactcggcatcattcctgtacagcggggtccctagcagattttcgggctctcggagcggaaccgactttaccctgaccatctcgtcgttgcaacctgaggactttgcaacttactactgccagcagcactatacgactcccccaacctttggacagggtaccaaggtggagattaagaggactgtggcagcaccctcagtgtttatcttcccaccatcggacgagcagctcaagagtgggactgcatcggtggtgtgcctgctgaacaacttctacccacgtgaggcgaaggtccagtggaaggtggacaacgcactgcaatccggaaactcccaggaaagcgtgaccgaacaagatagcaaagatagcacgtactcgctgagcagcaccctgaccctgagcaaagcagactacgaaaaacataaggtctacgcatgtgaagtcacccatcagggtctgtcctcacctgtgaccaaatcattcaatcgcggcgagtgt

SEQ ID NO: 15382 - DNA, 714 bp, synthetic construct
  misc_feature 1..714: note = source = /note="Description of Artificial Sequence: Synthetic coding sequence"
  source 1..714: mol_type = other DNA
atggcagtcatggcacctcggaccttggtgctcttgctgtcaggagcactcgcccttacccagacctgggcagatatccagatgactcaatctccgtcttccctgagcgcctctgtgggtgacagggtcacaatcacctgccgcgcctctcaggacgtgaacaccgcagtggcctggtatcagcagaaacccggaaaggcgccgaaactgttgatttattccgcaagctttctttatagcggtgtgccgtctcggttctctggctccagatccgggacagacttcacactcacaatatcgtctctacaacctgaggacttcgccacttattactgtcagcaacactatactacaccccccaccttcggacagggaaccaaagtcgagatcaagcgcacagtggctgcccccagcgtattcatctttcctccaagcgacgagcaactgaagtctgggaccgcaagcgtggtctgcctcttgaataacttctatcctcgggaagccaaggtgcagtggaaagtcgataatgctctccagtccgggaatagccaagagagtgtcacagagcaggattctaaggactcgacctattctctgagcagcactcttaccctgagtaaagccgactatgaaaagcacaaggtgtacgcctgcgaagtgacccaccagggactttcatcccccgtcaccaagagcttcaacaggggtgagtgt

SEQ ID NO: 15383 - DNA, 714 bp, synthetic construct
  misc_feature 1..714: note = source = /note="Description of Artificial Sequence: Synthetic coding sequence"
  source 1..714: mol_type = other DNA
atggcggtgatggccccgcgcactctggtgctgctgctctccggcgcactggccctcactcagacctgggcggatatccagatgactcagtcccccagtagcttgtccgcaagcgtcggtgatcgagtgactatcacgtgccgggcttcgcaagacgtgaacaccgccgtggcttggtaccaacagaagccgggaaaagcaccgaagctgctgatctactctgctagcttcttgtattccggagtgccatcgcgcttcagcggatcccgctcggggactgactttaccttgaccatctcatcactgcaacccgaagatttcgccacctactactgccaacaacactacactactccgccgaccttcgggcagggcacgaaggtcgagatcaaaaggactgtcgccgccccgtcagttttcattttccctccgtcagacgagcagcttaagagcggaaccgcctccgtggtgtgcctgctgaacaatttctaccctcgcgaagccaaagtccaatggaaggtggacaatgctcttcaatcaggcaattcccaagaatctgtcactgagcaagatagcaaggattccacgtacagcctctccagcactctgactctctcgaaagcggactacgagaagcacaaagtgtacgcatgcgaagtgacgcatcaggggcttagctcaccggtcaccaagtcctttaatcggggagaatgc

SEQ ID NO: 15384 - DNA, 714 bp, synthetic construct
  misc_feature 1..714: note = source = /note="Description of Artificial Sequence: Synthetic coding sequence"
  source 1..714: mol_type = other DNA
atggcagtcatggcaccaaggactcttgtgcttcttctcagcggtgcgcttgcccttacccaaacttgggccgatattcaaatgacccaatcaccaagcagcctgtcggccagcgtgggagatagagtgaccatcacctgccgggcctcccaggatgtgaacaccgccgtcgcatggtaccagcaaaagcctggtaaggcaccgaaacttctgatctacagcgcatcatttctgtattccggagtgccgtcaaggttttccggatcacggtctggaactgactttacccttaccatctcgtcgctgcaaccagaggattttgcaacttactactgtcaacagcattacactactccccccacctttgggcagggtaccaaagtggaaatcaaacggacggtggctgcgccttcggttttcatcttccccccttcggatgagcagcttaaatcaggtaccgcatcagtggtctgccttttgaataacttctacccaagagaggcaaaggtgcagtggaaggtcgataatgcactgcaatccggaaactcgcaggagagcgtgaccgaacaagattccaaggacagcacgtactccctgagctcgaccctgacgctgtccaaagcggactacgaaaagcataaggtctacgcatgcgaagtcactcatcaaggcctgtcgtctccagtgaccaagtcgttcaaccgaggagagtgt

SEQ ID NO: 15385 - DNA, 714 bp, synthetic construct
  misc_feature 1..714: note = source = /note="Description of Artificial Sequence: Synthetic coding sequence"
  source 1..714: mol_type = other DNA
atggccgtgatggcccctcggacattggtgcttctcctgagtggtgcgctggcgctcacacaaacttgggccgatattcagatgactcagagtccatcctcattgagcgctagcgtcggggacagagtcacaattacatgccgggcatcacaggatgtaaatacagccgtcgcatggtaccagcagaagccaggaaaagccccaaaactgctgatttacagcgcctctttcctgtacagcggggtaccttcccgattttccggctcaaggagtgggaccgattttaccctgacaataagctctttgcaacctgaggacttcgcaacatactattgccagcagcactacactactcctccgaccttcggtcagggcactaaggtggagatcaagcggacagttgctgcccccagcgtcttcatatttcctccctccgatgaacagctcaaaagcgggacagccagtgtggtgtgcctcttgaataatttctacccccgggaggctaaagtacagtggaaagtcgacaatgccttgcagtctggcaactctcaggaaagcgtcactgagcaggattctaaagactccacgtactcgctaagctcaacactgaccttgagcaaggcagattacgagaagcacaaggtgtatgcgtgtgaagtcacacatcagggcctcagctcccctgtgaccaagtctttcaatcgcggggagtgt

SEQ ID NO: 15386 - DNA, 714 bp, synthetic construct
  misc_feature 1..714: note = source = /note="Description of Artificial Sequence: Synthetic coding sequence"
  source 1..714: mol_type = other DNA
atggctgtcatggcaccgagaacacttgtgctcctgttgtcgggcgcgctggcacttacacaaacctgggcagacattcaaatgactcaaagcccatctagcctgagcgcaagtgttggagacagggtcactataacatgcagagcgagtcaagatgtgaacactgccgtggcgtggtaccagcagaaacccgggaaagcacccaaactgctgatctacagcgcctcatttctgtactccggggtcccttctcgtttcagcggatcaaggtccggtacagactttacactgaccatctcttcactgcaacccgaggacttcgccacatattactgccagcagcactatacaacgccccccacatttgggcagggaaccaaagtcgagatcaagcgcaccgtcgccgctccttccgtttttatttttccacctagtgatgagcagctgaagagtggcacagcctcagttgtgtgcttgcttaacaacttctaccctcgtgaggccaaggtccaatggaaagtggacaacgcactgcaaagcggaaacagccaagagagcgtcacagaacaggacagtaaggattctacttactccctgagtagcaccttaaccttatctaaagcggattatgagaagcacaaagtctacgcatgcgaggtaacacaccaaggattatcatcgccagtgacaaagtcctttaatagaggggagtgc

SEQ ID NO: 15387 - DNA, 714 bp, synthetic construct
  misc_feature 1..714: note = source = /note="Description of Artificial Sequence: Synthetic coding sequence"
  source 1..714: mol_type = other DNA
atggctgtaatggctccaagaacccttgtgcttctgctgtccggagccttggccctgactcaaacctgggctgacatccagatgacgcagtcaccatcttccctctctgctagcgtcggcgatagggtgaccatcacctgcagggcttctcaggacgtgaataccgctgttgcatggtaccagcaaaagcctggcaaggcaccaaagctgctgatctactccgcttcatttttgtactccggagtccctagtcgcttctcaggaagtagatctggtactgatttcacccttactatcagcagtctgcagcctgaggattttgcgacctactattgccagcagcactacacaactccacccacctttggccaaggaacaaaagtcgagatcaagagaacggtcgcagcaccaagcgtcttcattttcccacccagcgacgagcagttgaagagtggaaccgcctcagtagtttgtctgctcaacaatttctacccaagagaagccaaagttcagtggaaggtcgacaacgcgctgcaatccggcaactctcaggaatctgtgactgagcaggactccaaggattcaacctactctctcagctctactttgaccctcagcaaggctgactatgaaaagcataaggtctacgcctgcgaggtgacgcatcagggactgtcttcacccgtgaccaagagcttcaacaggggagagtgc

SEQ ID NO: 15388 - DNA, 714 bp, synthetic construct
  misc_feature 1..714: note = source = /note="Description of Artificial Sequence: Synthetic coding sequence"
  source 1..714: mol_type = other DNA
atggcggtgatggccccacggacgctggtgctgctgctttcaggtgcgctcgccctcacccagacctgggcagacatccaaatgacccagtcgccgagctctctgagcgcgagcgtcggagatcgcgtgaccatcacttgtcgagcctcgcaagacgtgaatactgctgtggcttggtaccaacagaagcccggcaaagcaccaaagctgctgatctacagcgcctcattcctgtactctggagtgccaagcagattctcgggatcccgctcaggcactgactttaccctgaccatcagctccctgcagccggaagatttcgccacttactactgtcagcaacattacaccaccccgcctacttttggacaaggtaccaaagtcgagatcaagcgcactgtggcggcaccatcggtgtttatcttcccgccgtccgacgaacagctcaagtcagggactgccagcgttgtgtgtctgctcaacaatttctatccgcgggaagctaaggtccaatggaaggtcgataacgccctgcagtcgggtaattcacaggagagcgtcactgagcaggactccaaggactcaacgtactccctgtcaagcactctcaccctctccaaagccgactacgagaagcacaaggtctacgcttgcgaagtgacccaccagggcctgtcgagcccagtgacgaaatcattcaatcggggcgaatgc

SEQ ID NO: 15389 - DNA, 714 bp, synthetic construct
  misc_feature 1..714: note = source = /note="Description of Artificial Sequence: Synthetic coding sequence"
  source 1..714: mol_type = other DNA
atggctgtcatggccccacggactcttgtgctgctcctgtcaggtgcattggccctgacccaaacgtgggctgacatccaaatgacccaatccccctcgagtctttcggcctccgtgggagatagagtcaccatcacctgccgcgcgtcgcaggatgtgaatactgcggtcgcatggtaccaacagaagcctggaaaggccccgaagctgcttatctactccgcgtcctttctctactcgggagtgccgtcgagattctcggggagccgcagcggaaccgatttcactctgaccatctcttccctccagccagaagatttcgctacgtattactgccagcaacattacactactcctccaactttcggacaggggactaaggtggaaatcaaaaggactgtcgctgcgccatccgtgttcatcttcccgccgtccgacgagcaactcaagtcgggtaccgcctcagtggtgtgcctgctgaacaacttttatcctcgcgaggccaaagtgcagtggaaagtggataacgcgctgcagtcggggaactcgcaagaatccgtgaccgagcaagatagcaaggactcgacttattcactgtcctcgactctcactctgagcaaagccgactatgagaaacacaaggtgtacgcatgcgaggttacccaccagggattgtcctcgccagtcaccaaatcgttcaaccggggcgaatgt

SEQ ID NO: 15390 - DNA, 714 bp, synthetic construct
  misc_feature 1..714: note = source = /note="Description of Artificial Sequence: Synthetic coding sequence"
  source 1..714: mol_type = other DNA
atggccgtgatggctccacgcaccctcgttctgctccttagcggagccctggctctgacccagacatgggccgatatccagatgacacagagtccttcatctctctcagcctctgtcggtgatagagtgactattacctgcagagcctcacaggacgtgaataccgccgtcgcctggtaccagcagaaacctggaaaggcccccaagcttctcatctactccgcaagttttctgtattcaggcgtgccctcacggtttagtgggtctaggagcgggaccgatttcacactgactatcagttcactgcaaccagaggactttgccacatattactgccagcagcattacacgacaccccccacattcggacaggggaccaaagttgaaatcaagaggacagtggcggccccatctgtgttcatctttccacctagcgatgaacagttgaagtcagggacagcctctgtagtttgtctcttgaacaatttctaccccagagaggccaaggtccagtggaaggtcgacaacgctttgcagtccgggaacagccaggaatccgtgacggaacaggacagtaaagatagcacctacagcctctcatctacactgacgctgtccaaagccgattacgaaaagcacaaggtttatgcatgcgaagttactcaccagggactttcttctccagtgaccaagtcttttaatcggggcgagtgt

SEQ ID NO: 15391 - DNA, 714 bp, synthetic construct
  misc_feature 1..714: note = source = /note="Description of Artificial Sequence: Synthetic coding sequence"
  source 1..714: mol_type = other DNA
atggccgtcatggcccctcgaactctggtgctactgttgtcgggagctttggccctgacccagacatgggccgacattcagatgacgcagtctccttcctccctctccgcctccgtcggcgaccgggtgaccatcacctgccgagcctctcaggatgtgaacaccgctgtagcctggtatcagcagaagcctgggaaggctccaaagctgctcatttacagtgcttcatttctatattctggcgttccttcgcgcttttcaggttcacgcagcgggactgacttcaccctcacaattagcagtctgcagcctgaagattttgcaacctattattgtcagcagcattacacaactccacctactttcggacaaggcacgaaggtcgagattaagaggaccgtggcagcgccttctgtctttatattccccccgtcagacgaacaactcaaaagcggcaccgccagcgtcgtgtgcctgctcaacaatttctatccacgcgaggcaaaggtgcaatggaaggtggacaacgccctgcagagtggaaactctcaggaatctgtcaccgagcaggactccaaggattctacctatagcctttcaagcacacttacattgtctaaggcagattacgagaagcataaagtttacgcatgcgaagtcacccaccaggggctgagcagccccgtgaccaagtcttttaacaggggcgagtgt

SEQ ID NO: 15392 - DNA, 711 bp, synthetic construct
  misc_feature 1..711: note = source = /note="Description of Artificial Sequence: Synthetic coding sequence"
  source 1..711: mol_type = other DNA
atggcggtcatggccccgcggactctggtgctgctgctcagcggtgcacttgcactcacccaaacctgggcacagatcgtgctgagccaatcgcctgctattttgtccgcatctccaggggaaaaggttactatgacttgtagggcatcctcctcagtgtcgtacatccattggtttcagcagaagcccgggtcgtcaccaaagccctggatctacgcaacttcaaacctggcatcaggtgtgccagtgagattcagcggatccggctctggcacgtcctactcacttacgatttccagggtcgaagcggaagatgccgcaacctactactgccagcagtggacttccaacccgcccacctttggtggcggtactaaactcgagattaagcgcaccgtggcggcaccttcagtgttcatttttcccccaagcgacgaacagcttaagagtggcactgcatcggtcgtgtgtctgcttaacaacttttaccctcgggaggcaaaggtccagtggaaggtcgataacgcactccaatcaggaaattcccaagagagcgtcaccgaacaagatagcaaagattcgacgtattccctgagctcgacccttacgctttccaaagcagattatgaaaagcataaggtgtacgcatgtgaagttactcatcaaggactttcctcaccggtgactaagtcgttcaatcgcggagagtgt

SEQ ID NO: 15393 - DNA, 711 bp, synthetic construct
  misc_feature 1..711: note = source = /note="Description of Artificial Sequence: Synthetic coding sequence"
  source 1..711: mol_type = other DNA
atggcagtcatggcgccgcggacactcgttcttttactttctggagctctcgcccttacacagacgtgggcacagattgtcctgtctcagtctccggcaatcctgtccgcttctccaggagaaaaagttacaatgacatgcagggcgagttcatccgtgtcttatatacattggtttcagcagaagccgggttcttctccaaaaccttggatttatgccacaagtaatcttgcgtctggagtccctgtgcggtttagcggctctggatccggcacatcatactcattgacaatttcgagggtagaggcagaggatgcagccacgtactactgccaacagtggacctccaatccgcctacgttcgggggcggtaccaaactggaaatcaaaagaacagtggcggctccctcagtatttatctttccgccgagcgatgagcagttgaagtctggcacggccagtgttgtttgccttctgaataatttttatccgcgagaagcaaaagttcaatggaaagtggacaacgctttacaatctggaaactcccaggaaagtgttactgaacaagactccaaagactccacctattcattgtcaagcacgttgacgttgtcaaaagccgattatgagaagcataaagtatatgcgtgtgaagtaactcatcaaggactgagctctccggttacaaaatcttttaatagaggcgagtgt

SEQ ID NO: 15394 - DNA, 711 bp, synthetic construct
  misc_feature 1..711: note = source = /note="Description of Artificial Sequence: Synthetic coding sequence"
  source 1..711: mol_type = other DNA
atggcagtgatggcgccacgcacattggtgttgcttcttagtggtgctttagctcttacccaaacttgggctcaaattgtgctttctcaaagccctgctattctctccgcctcacccggcgaaaaagttacaatgacttgccgagcatctagctccgtcagctatattcattggtttcaacaaaaaccgggttcttctccaaagccatggatttacgctacatcaaatcttgcttcgggagtcccagttcgcttcagtggttccggatctggaacatcttattccttgaccatttcacgagttgaggcggaagatgcggccacgtactattgccagcaatggacttctaatccaccaactttcggcggaggaactaagttggaaattaaaagaacagttgccgccccatctgtgtttatttttccgccatcagatgaacaacttaaatctggaacggcttctgtggtttgccttcttaacaatttttacccgagggaggcaaaagttcagtggaaggttgataatgctctgcagtcaggaaattcgcaagaatccgtgaccgaacaagatagcaaagattctacgtattctctgtctagtactctcacacttagtaaagctgactacgaaaagcataaggtttacgcttgcgaggtgactcaccagggcttgtcaagccctgtaacgaagagttttaaccgtggtgaatgt

SEQ ID NO: 15395 - DNA, 711 bp, synthetic construct
  misc_feature 1..711: note = source = /note="Description of Artificial Sequence: Synthetic coding sequence"
  source 1..711: mol_type = other DNA
atggccgtcatggctcccagaacgcttgtcctgctgctttccggagcccttgcgctgacccaaacctgggctcaaatcgtgttgtcccagtccccagccatactgagcgcatcacccggagaaaaagtcaccatgacctgtcgtgcatcttcatctgtctcctacattcactggtttcagcaaaagcctggttccagccctaagccatggatttacgctacttccaatctcgcatccggcgtgcctgtccgcttctcaggtagcggctccggaacctcatactccctgaccattagccgagtggaagctgaagatgccgcaacgtactactgtcaacagtggacctcaaatcccccgacttttggtggcggcactaagctggagattaagcggaccgtggcagccccctcggtgtttatcttccccccttctgacgaacagctcaagtcaggaactgcgtcggtggtctgcctcttgaacaacttttacccccgggaggctaaggtgcagtggaaagtggacaacgcactccaatcaggaaacagccaagaatcggtcacggagcaagattcgaaagacagcacctacagcctgtcctccactctgacccttagcaaggccgactacgaaaagcacaaggtctacgcgtgtgaagtcactcatcagggcctcagctcgcctgtgaccaaatcctttaaccgcggagagtgc

SEQ ID NO: 15396 - DNA, 711 bp, synthetic construct
  misc_feature 1..711: note = source = /note="Description of Artificial Sequence: Synthetic coding sequence"
  source 1..711: mol_type = other DNA
atggcagtgatggccccccgcactcttgtcctattactatcaggcgcccttgcactgacgcagacttgggcgcaaatcgttttgtcacaatcaccagccattctcagcgcctctcctggagaaaaagttactatgacgtgccgggcctcgagttccgtctcctatattcactggttccagcagaagcccggctcctcccctaagccctggatttatgccacaagcaacctggcctccggagtccccgtccgttttagcggtagcggttctggtacctcttattcccttacgatttcccgcgttgaggctgaagatgcagcgacatactattgccagcagtggaccagcaatcccccaaccttcggcgggggtaccaaactcgaaataaagcgaacagtggctgccccctcagtttttatatttcctccaagcgatgagcagcttaaatcaggtaccgcgtctgttgtgtgtctactcaataacttctatcccagggaggctaaagtgcaatggaaggtggataacgctctacagtccggaaatagtcaggagtccgtgacggaacaggattcgaaggattccacctatagcctttcctccaccttaaccctttccaaggccgattatgaaaaacataaggtgtatgcatgcgaggtgactcatcaagggcttagtagtccggtcactaagtcgttcaaccgaggcgagtgc

SEQ ID NO: 15397 - DNA, 711 bp, synthetic construct
  misc_feature 1..711: note = source = /note="Description of Artificial Sequence: Synthetic coding sequence"
  source 1..711: mol_type = other DNA
atggctgtgatggcccctagaactctggtgttgctcctgtccggagcccttgctctcactcagacttgggctcaaatcgtgctgagccagtcaccagccatcctctccgcgagcccgggagagaaggtgactatgacctgcagggcgagctcgtcggtgtcatacatccactggtttcaacagaaaccaggctcatccccaaagccttggatctacgcgacgtcaaacctggcctcaggagttccggtccgctttagcggatcgggcagcggaacttcttactccctcacgatctcgagagtggaagcagaagatgccgccacctactactgccagcagtggacctcaaatccaccgactttcggagggggaactaagctcgagatcaagagaactgttgctgcaccgtcggtattcatcttccctccgtcagatgaacagcttaagtcgggaaccgcctcagtcgtctgtctcctgaacaacttctacccgagggaagcgaaggtgcagtggaaggtggataacgcgttgcagtcagggaatagtcaagaatccgtcaccgagcaagactcaaaggattcaacttatagcctctcatccacccttaccctgagcaaggccgactatgagaaacacaaagtgtacgcgtgtgaggtgacccatcagggcctgtcctcaccggtgaccaagtcgttcaaccgcggggaatgt

SEQ ID NO: 15398 - DNA, 711 bp, synthetic construct
  misc_feature 1..711: note = source = /note="Description of Artificial Sequence: Synthetic coding sequence"
  source 1..711: mol_type = other DNA
atggccgtaatggccccgaggacactggtgcttctcctgagcggcgcactggcccttacacagacatgggctcagatagtgttgtcgcagtccccagccattttgtccgcctcccccggggaaaaggttaccatgacatgtagggctagctcaagcgtgtcctacatccattggtttcagcagaaacctggaagctccccaaagccctggatttatgccaccagcaatcttgccagtggagtgcctgtgaggttcagcggcagcgggtccggcacgagctacagcttaaccatttctagggtcgaggctgaagatgcggcaacatactattgtcagcaatggacctcaaatcctcctactttcggaggcggaactaaactagagattaaaagaacagtcgccgcaccctcagtgttcattttcccacctagcgatgagcagttgaaatccgggactgcaagcgtagtgtgtcttctgaacaatttttatccccgtgaggctaaagtacagtggaaagtggataatgccctgcagtcaggtaatagccaggagagcgtgaccgagcaagattctaaggattctacatactcactgtcttctaccctcaccctcagtaaagcagactatgagaagcacaaggtgtacgcgtgcgaagttacgcatcagggcctttcaagtccggtaactaagtcctttaatagaggcgagtgc

SEQ ID NO: 15399 - DNA, 711 bp, synthetic construct
  misc_feature 1..711: note = source = /note="Description of Artificial Sequence: Synthetic coding sequence"
  source 1..711: mol_type = other DNA
atggcagtaatggcaccaagaacacttgttttgcttttatcaggagctttagcattaacacaaacatgggcacaaattgttttgtctcaatcaccagctattctttctgcatcacctggtgaaaaagttactatgacatgtagagctagttctagtgtaagttatattcattggttccaacaaaaacctggatcttctccaaaaccttggatttatgcaacaagtaatttggcatcaggtgtacctgtaagatttagtggttcaggttctggaacaagttattcattaactatttcaagagttgaagcagaggatgcagcaacatattattgtcaacaatggacttcaaatccaccaacctttggaggaggaactaaattagaaattaaaagaactgttgcagcaccaagtgtttttattttcccaccatcagatgaacaacttaaatcaggaactgcttcagtagtttgtcttttaaataacttttatccaagagaagcaaaagtccaatggaaggtagacaatgctttacaaagtggaaatagtcaagagtcagttactgaacaagatagcaaagatagtacatactcacttagttctaccctaactttatctaaagctgattatgaaaaacataaggtatatgcatgtgaagttactcatcaaggacttagtagtccagttactaaaagtttcaatcgaggagaatgc

SEQ ID NO: 15400 - DNA, 711 bp, synthetic construct
  misc_feature 1..711: note = source = /note="Description of Artificial Sequence: Synthetic coding sequence"
  source 1..711: mol_type = other DNA
atggcggtgatggctcctaggactttggtactgctgttgagtggagctttagccctcacacagacctgggcgcaaatcgtactgagtcaatcaccagcgatactgtcggcatccccgggagagaaggtgacaatgacgtgtcgggccagctcttctgtgtcctacatacattggtttcagcaaaagcctggttcctcgccgaaaccatggatctatgccacttcaaacctggcaagcggagttccggtgaggttctccgggtctggctcagggacgtcgtactctctcacaatcagccgcgtcgaggctgaggatgccgccacctactattgtcagcagtggacctcgaacccgccaactttcgggggaggcactaagctggagatcaagcgcactgtggccgccccctcggtgtttatcttcccacccagcgatgagcagttaaaatccggtaccgcttctgtcgtgtgtctgctgaataatttctacccgcgcgaagcaaaggtgcagtggaaggtggataatgctttgcaatccggcaactcccaggaatccgtcaccgaacaggacagtaaggatagtacatactctctgtcatctacgctcacactgtccaaggccgattacgagaagcacaaggtatatgcgtgtgaggtcacccaccagggtctgagctccccagtgacaaagtccttcaatcgaggagaatgt

SEQ ID NO: 15401 - DNA, 711 bp, synthetic construct
  misc_feature 1..711: note = source = /note="Description of Artificial Sequence: Synthetic coding sequence"
  source 1..711: mol_type = other DNA
atggccgtcatggcaccgcgcacgctggtcctcctgttaagcggagctctcgcgctcactcagacatgggcacaaattgtgctgtctcagagccccgctatcctgtctgcgtccccaggcgagaaggtgactatgacttgccgcgctagctctagcgtgagctacatacattggttccagcagaagccgggctcctcaccgaagccgtggatctacgcaaccagcaacctcgctagcggtgttcctgttcggttcagcgggagcgggtctggcacatcatattcattgactatctcccgggtggaagccgaggacgcagcaacttattactgccagcagtggacgagcaatccaccaactttcggcgggggtaccaaactggaaatcaagagaactgtggccgctcctagtgtgttcatcttcccccccagcgatgagcagctcaaatcaggtaccgctagcgtggtgtgtctcctgaataacttctatccgcgggaagcgaaagtgcaatggaaggtcgataacgccctgcagagtgggaattcacaggaaagcgtgacggaacaggattccaaggattctacctatagtctctcctctacactgacactgagcaaggcagactacgagaaacacaaggtatatgcttgcgaggtcacacatcagggtctctcgtcccccgtgactaagtcatttaatagaggggagtgc

SEQ ID NO: 15402 - DNA, 711 bp, synthetic construct
  misc_feature 1..711: note = source = /note="Description of Artificial Sequence: Synthetic coding sequence"
  source 1..711: mol_type = other DNA
atggccgtgatggccccaagaactcttgtgctgcttctgtccggagcactggcgttaacacagacttgggcacagatagtgctgtcacaatcccctgccatcctcagcgccagccccggcgagaaggtgacaatgacgtgtagagcaagctcgagcgtatcctatatccattggttccagcagaagccaggctctagtcccaaaccttggatctacgcaacctccaatctcgcttctggtgtgcctgttaggttctcgggctctggttcagggacctcgtatagtcttacgatctcccgcgttgaagctgaagatgcggctacttattactgtcagcagtggacatcaaacccccccaccttcgggggagggacaaaactcgaaatcaagcgaaccgtggccgcaccatcggtgttcatcttcccaccatccgatgagcagttgaaaagcggaacagccagcgtggtctgccttctgaacaatttctatcccagggaggctaaggtccagtggaaagtggacaacgccctgcagtccggaaatagccaggagtccgtgacagagcaggactcgaaggactccacctactccttaagttctacactaacactttccaaagcggattacgaaaagcacaaagtgtatgcttgtgaagttacacatcagggcctctcatcccctgtgactaaaagctttaacaggggcgagtgc

SEQ ID NO: 15403 - DNA, 711 bp, synthetic construct
  misc_feature 1..711: note = source = /note="Description of Artificial Sequence: Synthetic coding sequence"
  source 1..711: mol_type = other DNA
atggctgtgatggctccgcggacgcttgttttgctgctcagcggagcactggctctgacccagacctgggcgcagattgtcctctctcagtccccggcgatactttcagcctctccaggagagaaggtaacaatgacatgtcgggcaagttccagcgtttcatatatccattggtttcagcagaagccaggtagttcacccaaaccctggatatacgcaacatccaacttggctagtggggtcccggttaggttttccggttctggatccggaacaagctattcactgacaatctccagagtcgaagctgaggatgcagcaacatactattgtcagcagtggacaagcaacccacccactttcggtggtggtactaaactcgagattaaacgtacagtcgcagctccaagcgtcttcatttttcctcctagcgatgaacagctcaaatcaggcacggcctccgttgtgtgcctcttgaacaacttttaccctcgcgaagccaaggtccagtggaaggtggacaacgctctacagagcggaaacagtcaggagtcagtcaccgagcaggattccaaggatagtacatactctttatctagtacactgacccttagcaaagctgactacgagaagcataaagtctatgcctgcgaggtaacacaccaagggcttagctcccctgtgacgaagtccttcaaccggggagagtgt

SEQ ID NO: 15404 - DNA, 711 bp, synthetic construct
  misc_feature 1..711: note = source = /note="Description of Artificial Sequence: Synthetic coding sequence"
  source 1..711: mol_type = other DNA
atggccgtcatggcacctcgcactctcgtgctgctgcttagcggagcactggccctcactcagacctgggcgcagattgtgctctcccagtctcctgcgatcctctcagcctcgccaggtgaaaaggtcacgatgacctgcagagcctcctcctcggtgtcctacatccattggttccagcaaaagccgggatcctcgccaaaaccgtggatctatgcaactagcaacctcgcatcaggcgtgcccgtgcgcttctcgggcagcgggagcggaacgtcgtactcactgaccatctctcgcgtggaagcggaagatgcggctacctactactgccaacagtggacctccaacccaccgactttcggagggggaacgaagttggagattaagagaaccgtggcggcaccatccgtgttcattttcccgccaagcgacgaacagctcaagtcgggcactgcctcggtggtctgcctgcttaacaatttctaccctcgggaagcgaaggtgcagtggaaagtggacaacgccctccagtcggggaacagccaggagagtgtgactgaacaggacagcaaggactcgacttactccttgagcagcactctgactctctcaaaggccgactacgagaagcacaaggtgtacgcctgcgaggtgactcaccagggactgagcagcccggtcacgaagtcgttcaatcgcggagagtgc

SEQ ID NO: 15405 - DNA, 711 bp, synthetic construct
  misc_feature 1..711: note = source = /note="Description of Artificial Sequence: Synthetic coding sequence"
  source 1..711: mol_type = other DNA
atggcagtgatggcccctagaacgctggtgctccttttgagcggtgcacttgctcttacccagacttgggcgcagatcgtcttgtcacagtcgccagcaattctgtcggcatcacctggagaaaaggtgacgatgacttgtcgggcttcgtcgtcggtatcctacatacattggttccagcagaaacctgggtcgtcgcctaagccatggatttacgcaacctccaaccttgcaagcggagtgcccgtgcggttttccggatccgggtccggcacctcctactccctcaccatttcacgcgtggaggcggaagatgcagccacgtactactgtcaacagtggacctcgaatccgcctacctttggtggaggaactaagctcgagattaaacgcaccgttgcagcgccttcggtgttcatatttccaccctccgatgaacagctcaagtccggcactgcatctgtggtgtgccttcttaacaacttttacccaagggaggccaaggtccagtggaaggtggataatgcgttgcagtctggtaatagccaagagtccgtgactgagcaggattccaaggactcgacctattcgctgtcgtccacgcttacccttagtaaagctgattacgaaaaacacaaggtgtacgcatgtgaagtcactcatcaggggctctcctcacctgtgactaaatcattcaaccgaggcgaatgc

SEQ ID NO: 15406 - DNA, 711 bp, synthetic construct
  misc_feature 1..711: note = source = /note="Description of Artificial Sequence: Synthetic coding sequence"
  source 1..711: mol_type = other DNA
atggccgtcatggccccccgcacgctggtattgctgctgtcaggagcactggcccttacacaaacctgggcccaaattgtcctctctcagtctccagcaattctgtcagcttctcccggcgagaaggtgactatgacctgccgggcctctagcagcgtatcctacatacactggtttcagcagaaaccgggcagtagtcctaagccatggatctacgcgaccagcaacctggcttctggagtgcccgtgagattttctggctctgggtcaggcacctcatattctctgaccataagccgggtagaggcggaggacgccgctacctactactgtcagcagtggacaagcaacccgcccaccttcgggggagggaccaaactagaaataaagcgcacagtggctgcaccaagtgtcttcatctttccgccatcggatgagcagctcaagagtggaacagccagcgtggtgtgtctgcttaacaacttttatccaagggaagcaaaagttcaatggaaagtggataatgccctgcaaagcggcaatagccaggagagcgtgacagaacaggatagtaaagatagcacttatagtctctcctcaaccctgactttgtctaaggctgattatgagaagcataaggtttatgcttgcgaggtcacccatcagggcctgagctcccctgtcacaaagtcattcaaccgaggggagtgt

SEQ ID NO: 15407 - DNA, 711 bp, synthetic construct
  misc_feature 1..711: note = source = /note="Description of Artificial Sequence: Synthetic coding sequence"
  source 1..711: mol_type = other DNA
atggctgtgatggccccacggaccttggttctcctcctgtccggagcactcgcactgacccaaacctgggcgcagatcgtgctgtcacagagccctgctatcctgtctgcgtcgcctggtgagaaagtcaccatgacttgtcgggcctcatcctcggtgagctacattcactggttccagcagaagcctggatcgtcaccaaagccgtggatatatgcaacctcgaatctggcgtccggcgtcccagtgcgtttctctggatcaggatcaggaaccagctactccctcaccatctcgcgcgtcgaagccgaagatgccgcaacttactattgtcaacagtggacttcgaaccccccgacttttggcggaggtacgaaactggagatcaagcgcacggtggcagcgccctcagtgttcatctttccgccttcggacgagcagctcaagtcgggtactgcctccgtggtgtgcctcctgaacaacttctacccgagagaagctaaggtgcaatggaaggtcgataacgccctgcagtcggggaattcccaagaatctgtgactgaacaagactccaaggactcaacgtactcgctgtcgagcacgcttaccttgtccaaagccgattacgaaaagcacaaagtctacgcgtgcgaggtgacccatcagggactgtcgagcccagttactaagtctttcaaccgaggggagtgc

SEQ ID NO: 15408 - DNA, 711 bp, synthetic construct
  misc_feature 1..711: note = source = /note="Description of Artificial Sequence: Synthetic coding sequence"
  source 1..711: mol_type = other DNA
atggcagtgatggcaccgcgcaccctggtgctcctgctgtccggcgccctcgcactgacccaaacctgggcgcagatcgtgttgtcccagtccccagccatcctttcagcttcccccggggaaaaggttaccatgacgtgcagggcctcatcctcagtcagctatatccattggttccagcaaaagccgggttcctcgccgaagccttggatctacgcaacttcgaacctggcctcgggggtgccggtgcggtttagcggctcgggatccgggacctcatactcgctcactatcagccgggtggaggcggaggatgccgcaacttactactgccagcagtggacttccaaccctccaacctttggtggcggaactaagctggaaatcaagaggaccgtcgccgccccatccgtgtttatcttcccgccatcggatgagcagctgaagtccggaactgcctcggtggtctgcctgctcaataacttctacccgagagaggctaaggtgcaatggaaggtggacaacgcgctgcagtcgggaaactcacaggagtcggtgaccgaacaggattcaaaggacagcacctactccctgagctcgaccttgactctcagcaaggccgactacgaaaagcacaaggtctacgcgtgcgaagtcacccatcaaggactgtcaagcccggtgaccaaatccttcaatcggggagagtgc

SEQ ID NO: 15409 - DNA, 711 bp, synthetic construct
  misc_feature 1..711: note = source = /note="Description of Artificial Sequence: Synthetic coding sequence"
  source 1..711: mol_type = other DNA
atggcagtcatggccccccgtactttggttctgctactgagcggagccctcgcactcacccaaacgtgggcacagattgttttatcacaatcaccggctatcctctcagcctctccaggcgagaaggtgacgatgacctgccgcgcatcgagttccgtgagctacatccattggttccagcagaaacccggttcctcgcctaaaccgtggatctacgccacttcgaacctggcctcaggcgtccctgtcaggttcagcggttccgggagcgggacctcttatagtcttaccattagcagggtggaggccgaagatgccgcaacatattactgccagcagtggacgagtaacccgcctacattcggggggggcacgaagctggagattaaacggacagtagctgcaccgtccgtcttcatttttccgcccagtgatgaacaattgaagtctggcaccgcatccgtcgtatgcttgctcaataatttctatccccgggaggcaaaggtacagtggaaggtcgacaatgctctgcaatctgggaactctcaggaatccgtgactgaacaggattccaaagattctacgtatagcttgtctagcacactcactctatctaaggctgattacgaaaaacacaaggtatacgcctgcgaggtgactcatcagggattgtctagtccagtgactaagtcgttcaacagaggagagtgc

SEQ ID NO: 15410 - DNA, 711 bp, synthetic construct
  misc_feature 1..711: note = source = /note="Description of Artificial Sequence: Synthetic coding sequence"
  source 1..711: mol_type = other DNA
atggcagtgatggcaccgcgtactcttgtgctcctgctgtcgggtgcgcttgcgctgacccagacttgggcacaaattgtgctgagccagtcccccgccatcctctccgcttccccaggcgagaaagtgacgatgacttgtcgggcttcgtcatcagtgtcatatatccactggttccagcagaagccaggaagctctcctaagccctggatctacgcaaccagcaacctggccagcggggtccctgtgcgcttctccgggtcgggatccggaacctcgtacagcttgactatcagcagagtcgaggcggaagatgccgcgacttactactgtcagcagtggacttccaatccgccgactttcggagggggaactaaactggagatcaaaaggactgtggcagcgccgtcagtgtttatcttccccccttccgacgagcagctgaaatcaggcaccgccagcgtcgtgtgcctcctgaacaacttctacccgcgcgaggccaaagtgcagtggaaggtggacaatgcgctgcagagcggaaatagccaggagagcgttaccgaacaggactcgaaagattccacctactcgctttcctccactctgaccctgtcgaaggccgactacgagaagcataaggtgtacgcatgcgaggtgacgcatcaaggactgtcctcgcccgtgactaagagcttcaatcgcggagaatgc

SEQ ID NO: 15411 - DNA, 711 bp, synthetic construct
  misc_feature 1..711: note = source = /note="Description of Artificial Sequence: Synthetic coding sequence"
  source 1..711: mol_type = other DNA
atggccgtcatggcaccaaggacgctggttttactgctcagcggggcactggccctcacgcagacctgggctcagattgttctgtcacagagccctgctatcctgagcgccagccccggagagaaggtaaccatgacctgcagagctagcagtagcgtgagctatatccactggttccaacagaaaccagggagctcgcctaagccatggatctacgccacaagcaatcttgctagtggcgtgccagtgcgtttttccggcagcggctctggaaccagctactccctgacgattagtagggttgaggctgaagacgcagcgacctattattgccagcaatggaccagcaacccacctacattcgggggcggaacgaagcttgaaattaaacgtaccgtcgctgccccatcagtgttcatttttcccccttcggatgagcaactcaagagcggaaccgcaagcgtcgtgtgcttgctgaacaacttttatcctcgcgaagcaaaggtccagtggaaggttgacaacgccctgcagtctggaaattcccaggagagtgtgaccgagcaagactccaaagatagcacatacagtctgtcatctacactgactctgtctaaagcggactatgagaaacataaggtgtatgcctgtgaggtgacacaccagggactgagtagcccagtcaccaaaagcttcaatagaggagaatgt

SEQ ID NO: 15412 - DNA, 711 bp, synthetic construct
  misc_feature 1..711: note = source = /note="Description of Artificial Sequence: Synthetic coding sequence"
  source 1..711: mol_type = other DNA
atggcggtgatggcacctagaaccctagtactgctgctgagtggggctctcgcgctgacccagacctgggcccagatagtcctgagtcagtcaccagctatcctcagcgcttctcctggagaaaaagttaccatgacctgccgcgcatccagcagcgtgagttacattcattggtttcagcagaaacccggcagttcccctaaaccctggatctacgccacctccaatctggcaagcggggtgccagtgagattcagtggaagcggatcaggtacatcctatagcctgacgatttctcgcgtcgaggccgaggatgctgccacctattactgccagcaatggacgagcaaccctcccacattcggcggtgggaccaagctggagataaagcgcaccgtagccgctccgtccgtgttcatcttccctcctagcgatgagcagcttaaatctgggaccgcttcggtggtgtgcctcttaaacaatttttatccacgggaggctaaagtgcagtggaaagtggataatgcccttcagtccggaaattcccaggaaagcgtcaccgagcaagattccaaagacagtacctatagcctgagctcaacgctgaccctctcaaaagcagattatgagaaacacaaggtgtacgcttgcgaggtgacccaccagggattgtctagtccagtgacaaagtcatttaataggggcgagtgt

SEQ ID NO: 15413 - DNA, 711 bp, synthetic construct
  misc_feature 1..711: note = source = /note="Description of Artificial Sequence: Synthetic coding sequence"
  source 1..711: mol_type = other DNA
atggccgtgatggcaccccggactctggtgctgctcctgagcggagctctggccctgactcagacttgggcacagatcgtgctcagccagtcccctgccattctgtccgcgtcgccaggggaaaaggtgacgatgacttgccgggcctcgtcgagtgtctcatacatccactggttccagcagaagcctggatcatccccaaagccgtggatctatgccaccagcaatcttgcttcaggtgtgccggtgagatttagcggctcgggttcaggcacctcatactccctgactatctcacgggtggaggccgaggacgctgctacttactactgccaacagtggacctcgaacccgccaactttcggaggaggaacgaaactcgagattaagcgcactgtggcggcgccgtccgtgttcatctttccaccgtcagacgagcagctgaaatcgggcactgcctccgtcgtttgtctcctcaacaacttctacccacgggaagctaaggtgcagtggaaggtcgacaacgcccttcaatcgggaaactcacaagaatccgtcacggagcaggatagcaaagatagcacttactctctgagctccactctgacgctgtcgaaggccgattacgagaagcacaaggtctacgcgtgcgaggtgactcaccaggggctcagctcgccggtgaccaagtcctttaatcgcggcgaatgc

SEQ ID NO: 15414 - DNA, 711 bp, synthetic construct
  misc_feature 1..711: note = source = /note="Description of Artificial Sequence: Synthetic coding sequence"
  source 1..711: mol_type = other DNA
atggccgtcatggccccacggaccctcgtgctgctgctgtcgggagctctcgctctcacccagacctgggctcagatcgtgctgtcgcagagcccagcaatcttgagcgctagcccgggcgaaaaagtgactatgacctgccgggcgagcagctcggtttcttacatccactggttccaacagaaaccgggatcctcgccgaagccatggatctacgcaacttccaacctcgcctcgggggtgcccgttcggttctctggcagcggatccggaacctcctactcgctcactatctcgagggtggaagcagaggacgctgctacttactactgtcaacagtggacgtcgaatccacctaccttcggagggggcactaaacttgaaatcaaacggactgtcgcagcaccctccgttttcatttttccgccttcggacgagcagctgaagagtggaactgcttcggtcgtgtgtctgttgaataacttttatccacgcgaggctaaggtgcagtggaaggtggataatgccttgcagtccggaaacagccaagaatcggtgactgagcaggactccaaggactcgacgtacagcttgtcatcgaccctgactctgtcgaaagcggactacgagaagcacaaagtctacgcctgcgaagtcactcatcaaggtctgagctcccctgtgactaagtctttcaaccgcggagaatgc

SEQ ID NO: 15415 - DNA, 711 bp, synthetic construct
  misc_feature 1..711: note = source = /note="Description of Artificial Sequence: Synthetic coding sequence"
  source 1..711: mol_type = other DNA
atggccgtgatggctccgcgtacacttgtgctcctgttgagtggagctcttgcacttactcaaacatgggcccaaattgttctttctcagtcgcctgctatcttgagtgcctcccctggcgagaaggttactatgacttgtagagcatcctcatctgttagttatattcattggttccaacaaaaaccgggatcttcacctaagccgtggatttatgctacttcaaatcttgcctcgggagttcccgtgcgttttagtggtagcgggtcaggtacctcttactctctgacgatctctagggttgaggcagaagacgccgccacctactactgtcaacaatggacttccaatccgccgacttttggagggggaacgaagttggagattaagcgtacagttgcagcacctagtgtctttatttttcctccatcagatgaacaactcaagtcagggacagcctctgtggtttgcctcctcaataacttttacccacgggaggcgaaggttcaatggaaagttgataatgcactccaaagtggcaattctcaagagagtgtgacagagcaagatagcaaggattcgacctatagtctttccagcacattgacactctctaaagccgactatgagaaacataaagtatacgcttgcgaagtcacacaccagggtcttagttcccctgtaaccaagtctttcaacagaggtgaatgc

SEQ ID NO: 15416 - DNA, 711 bp, synthetic construct
  misc_feature 1..711: note = source = /note="Description of Artificial Sequence: Synthetic coding sequence"
  source 1..711: mol_type = other DNA
atggccgtgatggcgcctagaaccctggtgctgttgctgtccggtgcccttgcgctgacccagacctgggcacaaatcgtgctctcgcagtcccccgcaattttgtcagcgtcacctggggagaaggtgaccatgacgtgtcgagcatcttcatcagtgagctacattcattggttccaacagaagcctggctcttcaccaaagccgtggatttacgccacttccaatctcgcttcgggagtgccagtgagattttcaggatcaggtagcggtacctcgtactcacttactatttcaagggtggaagcagaggacgcagccacctactattgtcaacaatggacttccaatcctccaaccttcggaggaggaactaagttggagattaaacgcaccgtcgcagcccctagcgtgtttatctttccaccttcggatgagcagctcaagagcggtaccgcctccgtagtgtgcctgctgaataacttctacccacgggaggcgaaggtgcaatggaaggtggataacgcactgcaatcaggcaactcccaagaatccgtcacggaacaggatagcaaggactcgacttacagcctgtcctccacgctgaccctctccaaagcagattacgagaaacataaagtgtacgcttgtgaagtgacccaccaagggctctcgtcgcccgtgacgaaatctttcaataggggagagtgc

SEQ ID NO: 15417 - DNA, 711 bp, synthetic construct
  misc_feature 1..711: note = source = /note="Description of Artificial Sequence: Synthetic coding sequence"
  source 1..711: mol_type = other DNA
atggctgtgatggctccacgcacgctggtgctgctgctgtcgggtgctttggccttgacgcagacgtgggcacaaatcgtgctgtcccagagccctgcgatcctgtcagcatcgccgggcgagaaggtaaccatgacgtgccgtgcttctagctccgtcagctatatacattggttccaacagaagcccggttcgtccccgaaaccgtggatttatgccacctcgaacctagcctcaggagtgcccgtcagattctctggatccggttccggaacgtcgtattccctgactatctcacgggtggaggcagaggacgccgcaacatactactgccaacagtggacgagtaatcctcccacgtttgggggcggcaccaagctggagatcaagcgtactgtagcagcaccgagtgtgtttatatttccacccagcgatgagcagttgaaatccggtaccgcgtccgtggtgtgcttgctgaacaacttctaccccagggaggcgaaggtgcagtggaaggtagacaatgccctacagtcaggcaacagccaagaatccgtgacggagcaggattcaaaggactcaacctacagtttatcgtccaccctcaccctcagcaaagccgattatgagaagcataaggtttatgcatgcgaagtgacccaccagggactgtcatcccctgtgacgaagtcatttaaccgtggtgagtgt

SEQ ID NO: 15418 - DNA, 711 bp, synthetic construct
  misc_feature 1..711: note = source = /note="Description of Artificial Sequence: Synthetic coding sequence"
  source 1..711: mol_type = other DNA
atggcggtgatggcgcctaggacacttgtcttgttgctatccggggctcttgcactaactcagacgtgggcacagatcgtgctttcacagtcacctgctatcctgagtgcttccccaggagagaaagtcacaatgacctgccgcgcatcttctagcgtatcctacattcattggtttcagcagaaaccagggtcctctcctaaaccttggatttatgcaacaagcaatctcgcgtccggagtgccagtcagattctccggttccggttccggtactagctactctttgacgatcagcagagtggaagcggaggatgcggccacctactattgccaacaatggacctccaatcctccaacattcggtggcggaaccaaactggagatcaaacggacagtcgccgctccatcggtatttatcttcccgcccagcgatgagcagttgaagagcggaaccgccagtgtggtgtgtctgctgaataacttttaccccagagaggctaaggtgcagtggaaagttgacaatgcgcttcagtctgggaactcccaggaatcagtgacagaacaggacagcaaggattccacatattcactctctagtaccctgacactgtcgaaggctgactacgagaagcacaaggtgtatgcatgtgaagttacgcatcagggactctccagtcctgtgacaaagtcattcaaccgtggggagtgt

SEQ ID NO: 15419 - DNA, 711 bp, synthetic construct
  misc_feature 1..711: note = source = /note="Description of Artificial Sequence: Synthetic coding sequence"
  source 1..711: mol_type = other DNA
atggctgtgatggcgccccgcacattggttctcctgctgtccggggctttggctctcacccagacgtgggcacaaatcgtgcttagccagtcacctgctatcctgtccgcctcacccggggaaaaagtgacaatgacttgccgggcatcatcatccgtctcttacatacactggttccagcagaaacccggatctagcccaaagccctggatctacgcgactagtaacttagcttctggagtgccagtccggttctccggcagcggatcagggacttcttatagtctgaccatatcaagagtcgaagccgaggatgccgcaacctactattgtcaacagtggacctctaacccacccacgtttggaggcggtactaagctggaaattaagaggactgtagccgccccgtctgtcttcatctttcccccatcagatgagcagctcaagagtggcactgctagtgtagtatgtctgctcaataacttctacccccgagaggctaaggttcaatggaaagttgataacgcccttcagtccggtaactcacaggaaagcgtcaccgagcaggattcgaaagattccacctattctttaagctctactctcaccctctctaaagccgattatgagaagcataaagtatacgcatgtgaagtcacccaccaaggactgtcatcacccgttacaaagtcttttaaccggggtgagtgc

SEQ ID NO: 15420 - DNA, 711 bp, synthetic construct
  misc_feature 1..711: note = source = /note="Description of Artificial Sequence: Synthetic coding sequence"
  source 1..711: mol_type = other DNA
atggcggtaatggcgccgcgtacgctagtactattattatcgggtgcgctagcgctaacgcaaacgtgggcgcaaatagttttatcgcaatcgccggcgatattatcggcgtcgccgggtgaaaaagtaacgatgacgtgtcgtgcgtcgtcgtcggtatcgtatatacattggtttcaacaaaaaccgggttcgtcgccgaaaccgtggatatatgcgacgtcgaatttagcgtcgggtgttccggtacgtttttcgggttcgggttcgggtacgtcgtattcgttaacgatatcgcgagtagaagcggaagatgcggcgacgtattattgtcaacaatggacgtcgaatccgccgacgtttggtggtggtacgaaactagaaataaaacgtacggtagcggcgccgtcggtatttatatttccgccgtcggatgaacaattaaaatcgggtacggcgtcggttgtttgtttattaaataatttttatccgcgtgaagcgaaagtacaatggaaagttgataatgcgttacaatcgggtaattcgcaagaatcggtaacggaacaagattcgaaagattcgacgtattcgttatcgtcgacgctaacgctatcgaaagcggattatgaaaaacataaagtatatgcgtgtgaagtaacgcatcaaggtttatcgtcgccggttacgaaatcgtttaatcgaggtgaatgt

SEQ ID NO: 15421 - DNA, 711 bp, synthetic construct
  misc_feature 1..711: note = source = /note="Description of Artificial Sequence: Synthetic coding sequence"
  source 1..711: mol_type = other DNA
atggccgttatggcaccccgcaccttggtgttgctgctgagcggagcgctcgccctgacgcagacctgggcacaaatcgtgctttcgcaatcgcccgcaattctttctgcaagtcccggtgaaaaggtgactatgacttgtcgggcatcatcgagcgtatcctacatacattggttccagcagaagccgggaagctcacccaaaccatggatttacgcaacttccaatctggctagcggcgttcctgtccgtttctcaggttcaggatcgggcaccagttattcactcaccattagccgtgtggaagcagaggatgccgctacctactactgtcagcaatggacgagcaacccacctacgtttggaggcggaactaaacttgagatcaagagaacggtggccgcaccgtcggtctttatctttccaccttcggacgaacaacttaaatcaggtactgcatcggttgtgtgtctcctgaacaacttttaccctcgagaggctaaagtccaatggaaggtcgataacgcactccagtccggtaacagccaagaatcagtgaccgaacaagattccaaggactctacctactctctttccagcaccctgaccctgagtaaggccgattacgagaagcataaggtgtacgcgtgcgaagtcactcaccagggactgtcgagcccagtcaccaagagcttcaatagaggggaatgc

SEQ ID NO: 15422 - DNA, 711 bp, synthetic construct
  misc_feature 1..711: note = source = /note="Description of Artificial Sequence: Synthetic coding sequence"
  source 1..711: mol_type = other DNA
atggccgtgatggctcctaggactctggtgctcctgttgtcaggtgctcttgcgctgacccaaacttgggcacagattgtcctgtcgcaatcacctgccatactttccgcctccccgggggagaaggtcaccatgacctgtcgcgccagctcgtctgtgtcgtacatccattggttccaacagaaaccagggagcagccccaagccctggatttacgcaacctcaaatttggcttcaggcgtccccgtcaggttttctggatctggttcaggaacctcctactccctcactatatcgcgggtggaagcagaagatgcagcaacttactactgccagcaatggacctcaaatccacctacttttggtggaggaactaaacttgagattaagcggactgtcgctgctccatcagtgttcatctttcctcccagcgatgaacaacttaagtcgggtaccgccagcgtggtgtgtcttttgaacaacttttaccctcgtgaagcaaaggtgcagtggaaagtggataatgcactccagagcggaaactcgcaagaaagcgtcactgaacaagacagcaaagatagcacgtattcgctctcatcaacgcttaccctttccaaggcggactacgagaagcataaggtttacgcatgcgaggttacccatcagggactgtcgtccccagtgactaagtctttcaacagaggcgaatgt

SEQ ID NO: 15423 - DNA, 711 bp, synthetic construct
  misc_feature 1..711: note = source = /note="Description of Artificial Sequence: Synthetic coding sequence"
  source 1..711: mol_type = other DNA
atggctgttatggcgccgcggacgttggtcctgttactgagtggggctctggcactaacacagacatgggcccagatagtcctgtctcagtctccggccatcctatccgcctctccaggcgagaaagtgacaatgacatgtcgcgcctcgagttccgtctcttatattcactggtttcaacagaaaccgggaagttctcctaaaccctggatatatgcaacttcaaacttagcaagtggagtccccgtgaggtttagtggctctggcagtggaactagctactccttgacaattagtcgcgttgaggcagaagatgccgctacttactattgccagcagtggacctcgaatcctcctacatttggtggaggtactaagctcgaaattaaacggacagtggcggccccaagcgtgttcatcttcccacccagcgacgaacaactgaagagcggcaccgcatccgtagtctgtttactgaacaatttttacccaagagaagctaaggtgcagtggaaggtagacaatgctttgcagagtggaaacagtcaggagtccgtgaccgagcaagacagcaaggattcaacttattctctcagcagcactttgaccctttctaaagcggattacgagaagcacaaggtgtacgcgtgtgaagtgacgcaccagggtctttcaagcccagttacaaaaagctttaacaggggcgagtgt

SEQ ID NO: 15424 - DNA, 711 bp, synthetic construct
  misc_feature 1..711: note = source = /note="Description of Artificial Sequence: Synthetic coding sequence"
  source 1..711: mol_type = other DNA
atggctgttatggctccgcgcactcttgtccttctactctccggtgcattggctcttacccaaacttgggcccagatcgtgctgtctcaaagccccgctatcctgagcgctagccccggcgaaaaggtgaccatgacctgccgtgcttccagctcggtgtcatacatccattggttccagcagaaaccagggtcgagccctaagccatggatttacgcaacctccaacctggcgtccggtgtcccagtccgttttagcggctcgggctcaggaacctcctacagcttgaccataagccgggtcgaagcggaagatgcagccacctactactgccagcagtggacctctaaccccccgacctttggcggaggaacgaagctggaaattaagagaaccgtagcggcgccatctgtgtttatcttccctccctcagatgagcagctgaagtcaggtacagcctccgtcgtctgtctcctgaacaacttctaccccagggaggcgaaggtgcagtggaaggtcgacaacgccctgcaaagcggaaacagccaggaatcagtcactgaacaggactccaaggattctacctattccctctctagcacacttaccttgtcgaaggccgattatgagaagcacaaggtttacgcctgcgaggttactcatcaaggcctgtctagcccggtcaccaagtcctttaatcgcggcgagtgc

SEQ ID NO: 15425 - DNA, 711 bp, synthetic construct
  misc_feature 1..711: note = source = /note="Description of Artificial Sequence: Synthetic coding sequence"
  source 1..711: mol_type = other DNA
atggcagtgatggccccacgcactctggtgctcctccttagtggggctctggcacttacccagacttgggcacaaatcgtgctctcgcagtcgccagcgattctctccgcttcacccggagagaaagtgaccatgacctgtcgtgcatcatcgagcgtctcatacatccattggtttcagcaaaaaccgggtagctccccaaagccatggatttatgccacttcaaatctggcatccggtgtgcctgtgagatttagcggatcaggttccggcacctcatactcacttactatttcgagagtcgaggcagaagatgcagcaacttactactgtcagcaatggacctcaaatcctcccacgtttggaggaggtaccaagctggaaatcaagcgaaccgtggcagccccctccgtgttcatctttcctccaagcgacgaacagcttaagtcagggaccgcctcagtcgtgtgtcttttgaacaacttttaccctcgagaggccaaagtgcagtggaaggtggataacgcactgcaatcgggcaattcgcaggagtcggtgacggagcaggattcaaaagattccacctattcccttagctccacgctgaccctttccaaggcagattacgaaaaacataaggtgtacgcctgcgaagtgacccaccagggtctgtccagccccgtcactaagagttttaacagaggtgagtgt

SEQ ID NO: 15426 - DNA, 711 bp, synthetic construct
  misc_feature 1..711: note = source = /note="Description of Artificial Sequence: Synthetic coding sequence"
  source 1..711: mol_type = other DNA
atggcagttatggcccccagaaccctggtgcttctgctctccggagcactggctcttactcaaacttgggcgcagatcgtgcttagccaatccccagctatcctgtccgcttcgcctggggaaaaagtgaccatgacctgtcgcgcaagctcatccgtgtcgtacattcattggttccagcaaaagcctggaagctcaccaaaaccatggatttacgctacctccaatcttgcctccggagtgcccgtgagatttagcggttcgggctcgggaacctcctactccttgactataagcagggtcgaagcagaggacgcggcaacgtactactgtcaacagtggacttccaaccctcccacgtttgggggcggaaccaagctggaaatcaagagaacggtggcagcaccttcggtgttcattttcccaccgtcagatgaacagcttaaatcaggaactgcctccgtggtgtgtctcctgaataacttctacccacgtgaagcgaaggtgcaatggaaggtggataacgcccttcagtcgggcaactcgcaggaatccgtgaccgaacaggattccaaggatagcacctactccctttcctcaacgcttacgctttcgaaggcggactacgaaaagcacaaagtgtatgcatgtgaagtcactcaccagggcctctcgtcgcctgtcaccaagtcgtttaacaggggtgagtgt

SEQ ID NO: 15427 - DNA, 711 bp, synthetic construct
  misc_feature 1..711: note = source = /note="Description of Artificial Sequence: Synthetic coding sequence"
  source 1..711: mol_type = other DNA
atggccgtgatggcccctcgcactttggtccttctcctctccggagcgctggccctgacccagacttgggctcagatcgtcctttcccagtcaccggcaattcttagcgcctcgccgggtgaaaaggtgaccatgacctgtcgcgcgtcctcgagcgtctcatacatccactggttccagcagaaaccgggatcctcgccaaagccttggatctacgctacgtccaatctggcctcaggagtcccggtgaggttttccggctcgggttcgggcacttcctactcactgactatcagcagagttgaagctgaagatgctgcaacctactactgtcagcaatggacttcaaatccgcctactttcggaggaggtactaaactggagatcaagcgcactgtggccgccccgtcggtgttcatcttcccgcctagcgatgaacaactgaaatcgggaaccgcctcagtggtctgcctgcttaacaacttctatccgagggaagcgaaagtccagtggaaagtggataatgcgctccagagcggcaacagccaagagtccgtgaccgaacaggattctaaagattcgacttattccctgagctccactctgactctgagcaaggccgactacgagaagcataaggtgtacgcatgcgaggtcacccaccaaggactcagttccccagttactaagtcgttcaatcggggcgagtgc

SEQ ID NO: 15428 - DNA, 711 bp, synthetic construct
  misc_feature 1..711: note = source = /note="Description of Artificial Sequence: Synthetic coding sequence"
  source 1..711: mol_type = other DNA
atggctgtgatggcacccagaacattggtgcttctgctatccggggctctcgcccttacccaaacttgggcccaaatagtattatcccagagccccgcaatactgagtgccagcccaggggagaaagtgactatgacctgcagagcttcctcatccgtgtcgtatattcactggttccagcagaaaccgggatcaagccccaagccgtggatctatgccacttcaaacctggctagcggcgtccccgttagattctccggtagcggatccggcacgagctatagcctgacaatttcaagagtcgaggcagaggacgcggctacctactattgccagcagtggacctcgaaccctcccaccttcggcggcgggaccaaactagaaattaagcgaaccgtggccgcaccttcagtgtttatctttccgcccagtgatgagcagctgaagtccggtacagctagtgtagtttgtttgttgaataatttctacccgcgagaagctaaagtccagtggaaagtggacaacgctctgcagtccggcaattcccaggaaagcgtgacagaacaagattccaaagattctacatacagcttgagttcgactcttacactctccaaagctgattacgagaagcataaggtctacgcctgcgaagttacacaccaggggctcagttcccctgtcaccaagtcttttaatcggggcgaatgt

SEQ ID NO: 15429 - DNA, 711 bp, synthetic construct
  misc_feature 1..711: note = source = /note="Description of Artificial Sequence: Synthetic coding sequence"
  source 1..711: mol_type = other DNA
atggccgtgatggccccacgcacgctggtgttgctgctgtccggagccctggcacttacgcaaacctgggcacagatcgtgctctcgcagtcaccggcgattctctcggccagccccggagaaaaggtaaccatgacttgtagagcgtcgtcaagcgtgagctacatccactggttccaacagaagcctggtagctcgcctaagccctggatatacgctacctcgaacctggcgtcgggtgtcccagtgaggttctcgggctcaggatccggcaccagctattccctcactatttcccgggtggaagctgaggacgccgccacctactactgccaacagtggacctcaaatccgccgactttcggcggtggaactaagctggagatcaagaggactgtcgcagccccgtcggtgttcatctttccgccttccgacgaacagctgaagtcgggaaccgcgtcggtggtctgtcttttgaacaacttctatccgcgcgaggcaaaggtgcaatggaaagtcgataacgctctgcaatcgggaaactcccaggagtcggtgaccgaacaggattccaaagactcaacctactccctctcctccaccttgaccctctccaaggccgactacgagaaacataaggtgtatgcatgtgaagtcactcatcaggggttgtcgtctccggtcaccaagagctttaacagaggcgaatgt

SEQ ID NO: 15430 - DNA, 711 bp, synthetic construct
  misc_feature 1..711: note = source = /note="Description of Artificial Sequence: Synthetic coding sequence"
  source 1..711: mol_type = other DNA
atggcagtgatggcgcctcgtacgcttgtcctcctcctgtctggcgccctggctctgactcaaacctgggcccagatcgtgctgagccagtccccggccatcttgtcggccagccccggagagaaagtcacaatgacatgcagggcgtcctccagtgtgtcctatatccactggttccagcagaagcccggatccagccccaaaccatggatttatgccacctctaatctggcttccggcgttccagtgcgcttcagtggtagtgggtccggaacatcttatagtcttactatcagtcgcgtcgaagccgaagatgcagcgacatattactgccaacaatggacttcaaatccccctacctttggcggaggcaccaaactcgaaataaagcgtacagtcgccgcgccctccgtgttcatttttcctccgtccgatgagcaactgaagtccggaacggcttccgtcgtttgtctgctaaacaatttctatcctcgcgaagcaaaggtccaatggaaggtcgataatgccctccagtccgggaattcacaggaatcggttactgagcaagacagcaaagacagtacatatagcctgtcctcgaccttaacgctctcgaaggctgattatgaaaagcataaagtgtacgcgtgtgaagtaacccatcagggactgtcttctccagttacaaagagttttaatcgcggtgagtgc

SEQ ID NO: 15431 - DNA, 711 bp, synthetic construct
  misc_feature 1..711: note = source = /note="Description of Artificial Sequence: Synthetic coding sequence"
  source 1..711: mol_type = other DNA
atggctgtcatggcacctcggacccttgtcctcctcctttcgggagccctggcgctgactcaaacttgggcccagatagtactgtctcagagcccagctatcctctccgcgtcgcccggcgaaaaagtgaccatgacttgtcgcgcctcatcctccgtgtcatacattcactggtttcagcagaagccaggatcgagcccgaagccttggatctacgcaacttctaatctcgccagcggcgtacccgttagattctcgggctccggaagtggaaccagctattcgctgaccatcagcagggtcgaagccgaggacgccgcgacctactactgccagcagtggacttcaaaccctccgacgtttggagggggtaccaagctcgaaatcaagcggaccgtggcggccccgagtgtgttcatcttcccaccgagtgacgaacagttgaagtcggggacggcatccgtcgtctgcctgcttaacaacttctaccctcgcgaagcgaaggtccaatggaaagtggacaatgcactgcaatccggaaattcacaggagtccgtcaccgaacaggattctaaggattcaacttactcattgtcaagcacgctgacgctgtccaaggctgactacgagaagcacaaagtgtacgcgtgcgaggtgacccatcaagggctgtcctcgcccgtgactaaatcattcaaccggggtgagtgt

SEQ ID NO: 15432 - DNA, 711 bp, synthetic construct
  misc_feature 1..711: note = source = /note="Description of Artificial Sequence: Synthetic coding sequence"
  source 1..711: mol_type = other DNA
atggccgtaatggcacctagaaccctggtgctgctcctctctggtgcgctggcactgacccagacctgggcccagatcgtactctctcaatcaccggctattctgtccgcgtctcccggcgagaaggtaactatgacctgcagagcttcctcctccgtatcctatattcactggtttcagcagaagccagggtcctcaccaaagccttggatttatgcaactagcaaccttgcctctggagtgccggtccggttttccggcagcggtagcggaacttcctacagcctcacaatttcacgcgtggaagctgaggatgctgccacatactactgccaacagtggacctctaatccccccacttttggaggtggaacaaaactggaaattaagcggacggtcgcagccccaagcgtttttatctttccccccagcgacgaacagttgaagtctgggactgcatccgtggtatgccttctcaataacttctacccccgagaggccaaagtccagtggaaggtggacaacgccctgcagtctgggaattcacaagaaagtgtgactgagcaggactctaaagattcaacatatagcctcagttctactctcacactcagtaaagcagattatgagaagcacaaggtctacgcgtgcgaggttacgcaccagggactgagctccccggtgacaaagtctttcaaccggggcgaatgt

SEQ ID NO: 15433 - DNA, 711 bp, synthetic construct
  misc_feature 1..711: note = source = /note="Description of Artificial Sequence: Synthetic coding sequence"
  source 1..711: mol_type = other DNA
atggccgtcatggcccccaggactctggtgttgttgcttagtggcgcccttgccctgacccaaacctgggctcagatcgttctgagccaatccccagccatactgtctgcttcccccggcgagaaggtcactatgacctgccgtgcatctagctcagtctcctacattcactggttccagcagaaacccggctcttctcctaagccttggatttacgcaacatccaatctcgccagtggagtgccagttagatttagtggctctggatccggtacttcttactctttgaccatatcacgcgtggaggctgaggatgccgctacttattattgccagcagtggacaagtaatcctcccacattcggcggtggaaccaaacttgagattaagagaacagttgccgccccatcagtgttcatttttccaccctctgatgaacagctgaaatctggtaccgccagcgtcgtatgtctgctgaacaacttttaccccagagaagctaaggttcagtggaaagtagataatgcactgcaaagtggcaactcccaggaatccgtgacagagcaggattcaaaggactccacatatagtctttcaagtactttgaccctgagcaaagctgattacgagaagcacaaagtttacgcctgcgaggtgactcaccagggcctttcatcccccgtcaccaaatctttcaataggggcgagtgt

SEQ ID NO: 15434 - DNA, 711 bp, synthetic construct
  misc_feature 1..711: note = source = /note="Description of Artificial Sequence: Synthetic coding sequence"
  source 1..711: mol_type = other DNA
atggccgttatggcccctcgcactctggtgttgttgctgtcaggcgctctagccctgacccagacctgggcccagatcgtgctgagccagagtcctgccatcctgagcgcctctcctggcgagaaggtgactatgacatgtcgggctagttcgtctgttagttatattcattggtttcagcaaaagccggggagttcacccaagccatggatatacgcaacttccaacttagcctcgggcgtgcctgtgcgcttcagtggctccggaagcggtacttcatacagcctcactatatccagggtggaggccgaggacgctgctacatattattgtcagcaatggacctctaacccccctaccttcggcgggggcaccaaacttgagatcaaacgaaccgtcgcagcaccttccgtgtttatatttccccccagtgatgagcagttaaagtcagggactgcctctgtagtgtgtctgctcaacaatttctaccctcgcgaagccaaagtgcagtggaaggtagataatgctctgcagagcgggaacagtcaggaaagcgtgacagaacaggattcaaaggacagtacctactcgttgtcctcgacccttaccctgtcaaaagccgattatgagaagcacaaggtgtacgcatgtgaggtgacacatcagggtctttcttcgcccgtaacaaaaagtttcaaccggggggagtgc

SEQ ID NO: 15435 - DNA, 711 bp, synthetic construct
  misc_feature 1..711: note = source = /note="Description of Artificial Sequence: Synthetic coding sequence"
  source 1..711: mol_type = other DNA
atggcagtgatggcccctaggacactggtgctgctactgtcgggggcactggctctgactcagacttgggcgcagatagtgctgtcacagtcgccagccatactctccgcctctcctggagagaaggtcacaatgacatgtcgcgcctcctcatcagtatcctacatccactggtttcaacagaaaccagggagttcgccgaagccatggatttatgctacctcaaacctggcatccggagtgcccgtacgcttttctgggtctggatctggaacgagctacagcttgaccatatctcgcgtggaggctgaggacgctgccacctattattgccagcagtggacatcaaatccacccacattcggtggaggcaccaagttagaaattaagcggacagtggcagccccatcagtattcatatttccgccctctgacgagcagctaaagagcggtaccgcttctgtagtttgtctgctcaacaatttttacccgagggaagccaaggtgcagtggaaggtggataacgctttgcaaagcggaaactcccaggagagcgtgaccgaacaggacagcaaagatagtacatacagcttatctagtacccttaccctatctaaggcagattacgagaaacataaggtttatgcgtgcgaggttacccaccaaggcttgagcagccctgtcactaagtcttttaaccgcggggaatgc

SEQ ID NO: 15436 - DNA, 711 bp, synthetic construct; identical to SEQ ID NO: 15419
  misc_feature 1..711: note = source = /note="Description of Artificial Sequence: Synthetic coding sequence"
  source 1..711: mol_type = other DNA

SEQ ID NO: 15437 - DNA, 711 bp, synthetic construct
  misc_feature 1..711: note = source = /note="Description of Artificial Sequence: Synthetic coding sequence"
  source 1..711: mol_type = other DNA
atggccgttatggcaccacgtaccttggttctgcttctgagcggagccttggcactcacgcaaacctgggcacaaatagtgctttcacaatcccctgccattctctccgcatcaccaggtgagaaagtgaccatgacctgccgggcaagcagctccgtgtcctacattcattggttccagcagaagccaggatcatcaccaaaaccttggatctacgcaactagcaacctggcatcgggtgtcccagtgagattctcgggatccggaagcggtacttcctactcgcttaccatttcgagagtggaggcagaagatgccgcaacttactactgccaacaatggacctctaaccctcctacgtttggtggtggtaccaaacttgagatcaaaaggactgtggcagcaccttcggtgttcatttttccacccagcgatgagcagctcaagagcggtaccgcgagcgtcgtgtgtctgctgaataacttctaccctagggaagccaaggtgcagtggaaggtggacaacgctctgcaatccgggaattcacaagaatcagtgaccgaacaggactcgaaggatagcacctactcgctctcatcgacgctgactctttcgaaggcagactacgaaaaacataaggtgtacgcgtgcgaagtcacccatcaaggtctttccagcccagtgacgaagtcgtttaacagaggggaatgc

SEQ ID NO: 15438 - DNA, 711 bp, synthetic construct
  misc_feature 1..711: note = source = /note="Description of Artificial Sequence: Synthetic coding sequence"
  source 1..711: mol_type = other DNA
atggcagtcatggcacctcgaacgctggtcttattactgtcaggtgccctggccttaactcaaacttgggcgcagatcgtgctgtctcagagccccgccatactaagcgcctcaccaggggaaaaggtgactatgacatgtagggctagttcatcggtttcctacattcactggtttcagcagaagcccggatctagtcccaaaccctggatctatgccacctccaatctagccagcggggtgcccgtcaggttctccggcagtggatctggaacgtcttacagcctaacaatctcccgagtggaagctgaagacgccgcgacgtattactgccagcagtggaccagcaatcccccaactttcgggggtggcaccaagctggaaatcaagagaacagtagctgctccctcagtatttatcttccctccctcagacgagcagctgaagtcaggcactgcttctgtcgtgtgtctcctcaataatttctaccccagagaggccaaagtgcagtggaaggtggataacgctctccagtctggcaatagccaggaatccgtcactgaacaagactccaaagattctacctattctctctcttccactctgactctgtctaaagccgactacgaaaaacataaagtgtatgcttgtgaagtcacacatcaaggcctctctagccccgtgaccaagtcctttaataggggggaatgt

SEQ ID NO: 15439 - DNA, 711 bp, synthetic construct
  misc_feature 1..711: note = source = /note="Description of Artificial Sequence: Synthetic coding sequence"
  source 1..711: mol_type = other DNA
atggcagtgatggccccacggacactagtgcttctattaagcggtgcattagcactgactcagacctgggcacagatagtgctatcccagagcccagccatcctgtctgcgagccccggtgaaaaggttaccatgacttgcagggccagttccagcgtgagttacattcactggtttcagcagaagccaggaagttcgcccaaaccctggatttatgccactagtaatttggcttcgggtgttccagtcagattttctggctccggaagcgggactagctactccctgaccatctcccgagtcgaggctgaggacgcagccacttattattgtcaacagtggacttctaatcctccaacatttgggggcggtaccaaactggagataaaaagaacggtcgccgcccctagtgtcttcattttcccaccatcagatgagcagctcaagagcggaacggctagcgtggtttgcctgctcaataacttctaccctagggaggcaaaagttcagtggaaagtggacaacgcgctccagtccggcaacagtcaggaatcagttaccgaacaggactccaaggacagcacctacagtctgtcgtcaactctgacattgagcaaggccgattatgaaaagcacaaagtctacgcctgcgaggtgacccatcagggcctcagttctcccgtaactaaaagctttaatagaggcgagtgt

SEQ ID NO: 15440 - DNA, 711 bp, synthetic construct
  misc_feature 1..711: note = source = /note="Description of Artificial Sequence: Synthetic coding sequence"
  source 1..711: mol_type = other DNA
atggctgtcatggccccaagaacccttgtgctcctgctgtctggagcattggccctgacccagacttgggcccagattgtcctgtcccaatcgccggcaatcttgtccgcatcccccggcgagaaggtcaccatgacttgccgcgcttcgtcctccgtttcctacatccactggttccagcagaagccgggatcatcaccaaaaccgtggatctatgccactagcaatctcgcgtccggcgtgccagtgcggtttagcggatcaggatcagggacgtcttacagcttgacgatctctcgcgtggaggctgaagatgcagcgacctactactgccaacaatggacttccaatccaccgactttcggaggtggaactaagctcgaaatcaaacgaactgtggccgctccaagcgtgttcatattccctccgtcagacgagcagctgaaatcggggaccgcgtccgtggtttgtcttttgaataacttttacccccgggaggcgaaggtccagtggaaggttgacaacgcacttcagtccggaaacagccaagagtcagtgacggaacaggattcgaaagattcaacctactctctctcgtcgaccctcactctgtcgaaggccgactacgaaaaacataaggtgtacgcgtgcgaagtgacccaccaaggcctctcctcgccagtcactaagtccttcaaccgcggtgaatgc

SEQ ID NO: 15441 - DNA, 711 bp, synthetic construct
  misc_feature 1..711: note = source = /note="Description of Artificial Sequence: Synthetic coding sequence"
  source 1..711: mol_type = other DNA
atggccgtgatggctccccgaaccctggtgttattgttaagtggagctctcgcactgacacaaacctgggcacagattgtgctgtcacaatcacccgccattctgtccgcatcgcctggggaaaaggtcaccatgacatgcagagccagtagtagcgtaagttatatacattggtttcagcagaaacctggaagctcccctaagccgtggatctacgcgacgagcaacttggcctcaggggtccccgtgcgcttttccgggagcggcagcggtactagttacagtctcacaatctccagggtcgaagccgaagacgccgctacttattattgccagcaatggacttccaacccgcctacatttggcgggggaaccaaactggagattaaacggactgtggcagcaccatctgtttttatcttccccccttctgatgagcagctcaaatcgggaactgcctctgtggtctgtttgctcaacaacttttatccaagggaagccaaagtgcagtggaaagtggataacgccctacaaagcggtaattcacaggagagcgtgacagaacaggattccaaagactctacctatagcctgtccagcaccctgactctaagcaaagcagattatgagaagcacaaagtctacgcctgtgaagtgacccaccaaggactgtccagtccggtcaccaaaagcttcaatcgcggcgagtgc

SEQ ID NO: 15442 - DNA, 711 bp, synthetic construct
  misc_feature 1..711: note = source = /note="Description of Artificial Sequence: Synthetic coding sequence"
  source 1..711: mol_type = other DNA
atggcagtgatggctccgaggaccctcgtgttgctgctctcgggcgctctcgctttgacgcaaacgtgggcccagattgttctgagccaaagccccgcgatcttgtctgcaagcccgggcgaaaaggtcactatgacctgccgcgcatcctcctcagtctcctacatccattggttccaacaaaaacccggctcctcaccaaagccttggatctacgccacctccaacctggccagcggtgtgccagtgagattctccggttcagggtcgggtacttcctactcactgaccatctcccgggtcgaggctgaggatgcagccacctactactgccagcagtggacgtcaaaccctccaacttttggcggtggaacgaagctggagatcaaaaggaccgtggctgccccatcggtgtttatctttccaccgtcagatgaacagctcaaatcgggcaccgcctcggtagtgtgccttctcaataacttctacccgcgcgaggccaaggtgcagtggaaagtggacaatgccctgcagagcggaaacagtcaagaatccgtcactgaacaggacagtaaggacagcacttacagtctttcctctaccctgactttgagcaaggcggattatgagaagcacaaggtgtacgcgtgcgaagtcactcaccagggactgtcatcacccgtgactaagtcgttcaatcggggggaatgt

SEQ ID NO: 15443 - DNA, 711 bp, synthetic construct
  misc_feature 1..711: note = source = /note="Description of Artificial Sequence: Synthetic coding sequence"
  source 1..711: mol_type = other DNA
atggccgtgatggctcctaggaccctcgtgctcttgctgtcaggcgctttggccctgactcagacctgggcccagatcgtgttaagtcaatctcccgccattctgtctgcctctcctggtgagaaggtcacgatgacctgcagagccagtagtagcgtgtcctacattcactggtttcagcagaagccggggtcgagcccgaagccatggatttatgctacgtccaacctagctagtggggttccagtgcggttcagcgggtctgggtccgggaccagctactctttgacgatcagccgagtggaagctgaagatgccgcaacatactattgccagcagtggacatcaaatccaccaaccttcggaggcggcactaaactggagataaaaagaactgtcgctgcgccatcagttttcatcttcccaccttctgatgagcagctgaaaagcgggaccgcttccgtcgtgtgtttgcttaataacttctatccacgggaggccaaagtgcagtggaaggtggacaacgccctccaaagcggcaatagtcaggaatctgtcacagaacaagacagcaaagattctacgtacagtctgtcatctacgctgacactcagcaaagctgactacgaaaagcacaaagtgtacgcttgcgaggtcacacaccagggactgtcttcaccagtcacaaagagcttcaataggggggaatgt

SEQ ID NO: 15444 - DNA, 711 bp, synthetic construct
  misc_feature 1..711: note = source = /note="Description of Artificial Sequence: Synthetic coding sequence"
  source 1..711: mol_type = other DNA
atggcggtgatggcgcctcggaccctcgtgctgctcttgtcgggcgccctggcgttgactcagacttgggcgcagatcgtgttgtcccaaagccccgctatcctgtcggcctcgcctggagaaaaggtcactatgacctgcagagcaagctcatcagtgtcctacatccactggttccagcaaaaaccgggaagctcccctaagccatggatttacgcaacctcgaacctcgcctcaggcgtgccagtccggttttcgggatcgggcagcggcacgtcctactccttgactatttctcgcgtggaggctgaggacgccgccacgtactactgccagcaatggacgagcaatccgccgactttcggagggggaaccaaactggaaatcaagcgcaccgtggccgccccgtcggtgttcatattcccaccgtccgatgagcaactgaagtcagggaccgcttcggtggtgtgtctgttgaacaacttttacccgcgggaagctaaggtgcagtggaaggtggataacgccctccaaagcggtaactcacaggaaagcgtgactgaacaggatagcaaagactcaacctactcgctgtcgtcgaccctcacgctctccaaggccgactacgagaagcacaaggtgtacgcatgcgaagtgacgcatcaaggcctcagttcacctgtgactaagtcgttcaacagaggtgagtgt

SEQ ID NO: 15445 - DNA, 711 bp, synthetic construct
  misc_feature 1..711: note = source = /note="Description of Artificial Sequence: Synthetic coding sequence"
  source 1..711: mol_type = other DNA
atggccgtcatggcccctagaacactcgtgctacttctgtccggcgctctagccctaactcagacctgggcccagatcgtgctgtcacagtcaccggcaatactgtccgcctcacccggcgagaaggtgaccatgacttgtagagccagcagcagcgtcagctatatccactggtttcagcagaagcccggaagctcacccaagccctggatctacgccacatcaaatctggcttcgggtgtccccgtcaggttctccgggtcggggtctggcacttcctattcccttaccatctctcgtgttgaggctgaggacgcagctacatactattgtcaacagtggacctccaaccctccaacatttggcgggggtaccaaacttgaaatcaagcgcactgtcgccgctccgtcggtgttcatctttccaccctctgatgagcagctaaaaagtggtactgcatctgtggtatgcctgctgaacaacttctacccacgtgaagccaaggttcagtggaaagtggacaacgcgcttcagagcggcaactcccaggagtctgtaacagagcaggacagcaaagacagcacctattcactgtctagcaccctgaccctgtccaaagccgactacgagaagcataaggtatacgcctgcgaggtcacccatcaggggttaagcagcccagtgaccaagtcttttaaccgaggtgagtgc

SEQ ID NO: 15446 - DNA, 711 bp, synthetic construct
  misc_feature 1..711: note = source = /note="Description of Artificial Sequence: Synthetic coding sequence"
  source 1..711: mol_type = other DNA
atggccgtgatggctcccaggaccctcgtgttgcttttatcaggcgccctggcactgacacaaacatgggcccagattgtgctgtcgcagtcacctgccatactgtctgcatcgccaggcgaaaaagtgaccatgacctgcagagcctcctccagcgtgtcgtatatccactggttccagcagaagccagggtcgagtccaaagccttggatttacgctacaagtaatttggctagcggggtgcccgtacggttcagcggttcggggtcaggaactagctactctctgaccatctcccgggtggaggccgaggacgccgcaacctattactgtcagcagtggacgtccaatcctccaacctttggcggcggtaccaaattagaaataaagcgtacggtcgcggccccttccgtttttattttcccgccatcggatgaacagctcaaaagcggaaccgcctccgtcgtctgtctgctgaataacttctatcctcgagaagccaaagtacagtggaaagttgacaatgccctccaatcaggcaacagccaggaaagtgtgacggaacaagacagcaaagacagcacgtatagtttgagcagtacacttacgctctccaaagcagactatgagaaacataaggtctatgcatgcgaagtgacccaccagggtctgtccagccccgtcaccaagtccttcaaccgcggggaatgc

SEQ ID NO: 15447 - DNA, 711 bp, synthetic construct
  misc_feature 1..711: note = source = /note="Description of Artificial Sequence: Synthetic coding sequence"
  source 1..711: mol_type = other DNA
atggcggttatggcccctcgtacgctcgtgctgctgctttcgggggcccttgcccttacccaaacttgggcccagattgtgctttcgcaaagccccgccattttgtccgccagcccaggagaaaaggttaccatgacttgtcgggcatcttcaagcgtgtcgtacatccattggtttcagcaaaagccaggatcatcacctaagccttggatctacgcaactagcaatcttgcatcgggcgtacccgtgcgattcagcggctcaggatccggtacgtcgtacagcctgacgatctccagagtggaagccgaagatgcagcgacttattactgccagcaatggacttcgaaccctccaacgttcggcggtggaactaaactcgagattaagcgaaccgtggcagcaccttccgtgttcatatttccgccaagtgatgagcagttgaaatcaggaaccgcatccgtggtgtgccttcttaacaatttctacccaagagaagcgaaggtgcaatggaaagtcgacaacgcgctccagtccggtaattcacaagagtcggtcactgaacaagattctaaagacagcacctactctttgtcatcaaccctcactctgagcaaagcggactacgagaagcacaaggtgtacgcgtgtgaagtgacccatcagggactctcatcgccggtgactaagtcatttaacagaggtgaatgt

SEQ ID NO: 15448 - DNA, 711 bp, synthetic construct
  misc_feature 1..711: note = source = /note="Description of Artificial Sequence: Synthetic coding sequence"
  source 1..711: mol_type = other DNA
atggccgtgatggccccccgtactcttgtgttgctgcttagcggagctctcgccttgacgcaaacttgggcgcaaattgtattgtcgcaatcgcctgccatcctttccgcctcacccggagaaaaagtgaccatgacttgcagggcgtcctcgagcgtttcctacatccattggttccagcagaagcctggcagctccccaaagccgtggatctacgcaacttcaaatctggcttccggggtgccagtgcggttttcaggctccggatcgggaacgtcatactcccttactatctcgagagtggaagcagaagatgccgctacctactactgccaacagtggacgtcgaacccacccactttcggtggcggtaccaagctcgagatcaaacggaccgtcgccgctccgtcggtattcatctttccgccgtcggatgaacagctgaagagcggaaccgcatcggtggtgtgcctgctgaataacttctacccgcgcgaagccaaagtgcagtggaaggtggataacgcgctgcaatcgggaaacagccaagaatcggtgacggagcaggactcaaaggactctacttactcgctgtcgtccaccctgactctctccaaggccgactacgagaagcacaaggtttatgcatgcgaggtcacccaccagggactgagctcgccggtgactaaatccttcaatcggggcgagtgt

SEQ ID NO: 15449 - DNA, 711 bp, synthetic construct
  misc_feature 1..711: note = source = /note="Description of Artificial Sequence: Synthetic coding sequence"
  source 1..711: mol_type = other DNA
atggctgtcatggcaccacggacacttgtgctactgctttcaggagcactggccctcacacagacttgggcccagattgtgctctcccagtctcccgccatcctatccgcttcccccggggaaaaagtgacaatgacgtgcagagcctcctcttctgttagttacatacactggttccagcagaaacctggatcttcccccaaaccttggatttatgctacatccaacctcgctagtggagtgccagtgcggttcagtggatccggatccggaacatcctacagtttaacaataagtcgagtggaggcagaagatgctgccacatattattgtcagcagtggacgtctaacccacccacatttgggggagggactaagctagaaattaaaagaacagtggctgcaccatccgtgtttatatttccaccttccgatgaacagcttaagtccggaacggcttccgtcgtgtgtctacttaacaatttctatccacgcgaagctaaagtccagtggaaggttgataacgccttgcagtctggaaactcccaggaatctgtgactgaacaggattcaaaagatagtacttatagtctatcctcgacacttactctgtccaaagcggattacgaaaaacataaggtatatgcttgcgaagtgactcatcagggactctctagtcccgtcacaaagtcttttaacagaggggagtgc

SEQ ID NO: 15450 - DNA, 711 bp, synthetic construct
  misc_feature 1..711: note = source = /note="Description of Artificial Sequence: Synthetic coding sequence"
  source 1..711: mol_type = other DNA
atggctgttatggcaccacgaacgctggtactgctgttgtccggcgctctggctctgactcagacttgggcacaaatcgtgctttcacagtctcccgccatactttccgcctctccaggggagaaggtcacaatgacgtgccgggcctcttctagtgtaagctacatacattggtttcagcagaaaccaggatcctccccaaagccatggatttacgctacgtccaatctggcaagtggagttcctgtgaggtttagcggatctggtagcggaaccagctattcccttactatatctcgggtcgaagcagaagatgcggctacctattattgtcaacagtggacatccaaccctccgaccttcggcggggggactaagctggagatcaaacggaccgtggctgcgccctctgtattcatcttcccaccttctgacgaacagctcaaaagcggaacagcatctgtggtatgtcttctcaataatttttacccgcgggaagccaaggtgcaatggaaagtggataatgcccttcagtcagggaatagtcaagagtccgtaacagaacaggattccaaggacagtacgtactcactgtcatctactcttacgctcagcaaggctgattatgagaagcataaggtatatgcctgtgaagtgacccaccaggggctctcaagtcctgtgactaaatctttcaacagaggagaatgc

SEQ ID NO: 15451 - DNA, 711 bp, synthetic construct
  misc_feature 1..711: note = source = /note="Description of Artificial Sequence: Synthetic coding sequence"
  source 1..711: mol_type = other DNA
atggccgttatggctccaagaacacttgtgttactgctgtctggggccctggctctgacacagacctgggctcagatcgttctgagccagtctcccgctattctctcagcttcacctggggagaaagttaccatgacatgtcgcgcttcttcttccgtcagttacatccactggttccaacagaagcctggaagctctcccaaaccctggatctacgccacctccaatctggctagtggggttccagtaagattttccggctccgggagcgggacaagctacagtttaaccattagtagggtggaagccgaagacgctgccacctactactgtcagcaatggaccagcaacccgcccaccttcgggggaggtaccaagctggaaattaagcgcactgtggcagcaccttcagtgttcatcttcccacctagtgacgagcagctgaaatctgggaccgcctccgtggtgtgtttgctgaataacttttatccaagggaagcaaaggtccagtggaaagtagacaacgcccttcagtctgggaattcacaagagagcgtgactgaacaagattctaaggactccacttactctctgtccagtaccctgaccttatcaaaggctgattatgaaaaacacaaggtatatgcatgcgaagttactcatcagggcctctctagtcctgtcactaaaagcttcaaccgcggcgagtgc

SEQ ID NO: 15452 - DNA, 711 bp, synthetic construct
  misc_feature 1..711: note = source = /note="Description of Artificial Sequence: Synthetic coding sequence"
  source 1..711: mol_type = other DNA
atggccgttatggcccctcgcaccttggtcctgctgctgagcggcgcgctggccctcacccaaacctgggcacaaatagtactgagtcagagtccagctatcctgtctgcaagcccaggagagaaggtgacaatgacctgccgagcatcctctagtgtttcatatatccactggtttcagcagaagcctggctcctcacctaaaccttggatatatgcaacatctaatcttgctagtggcgtgcctgtcagattctctggctctggatctggcacatcctactctctgactatcagccgggtggaagctgaggacgcagcaacctactattgccagcagtggacttcaaatcctccgacttttgggggaggaaccaaactcgagatcaagcggactgtcgcggctccttccgttttcattttcccccccagcgacgagcagttgaagtcaggaacagcatccgtggtctgcttgctgaacaacttctacccgagagaggctaaagtgcagtggaaagtggacaacgcattgcaatctggcaacagccaagagtccgtgacagagcaggactctaaggatagcacctacagtctctcctctacacttactttgagtaaggctgactatgaaaaacataaagtttacgcttgtgaggtcacccatcagggactgtcaagtccagttacgaagagttttaatcggggagaatgc

SEQ ID NO: 15453 - DNA, 711 bp, synthetic construct
  misc_feature 1..711: note = source = /note="Description of Artificial Sequence: Synthetic coding sequence"
  source 1..711: mol_type = other DNA
atggccgtgatggccccaagaacacttgtgctgctgttgagcggggctctagcactgacccagacatgggcccagatcgtcctgtctcagagcccagccattttgagcgcttcccccggggagaaggtaactatgacctgcagagcgagctcttccgtgtcttatattcattggttccagcagaagcccggcagctcaccaaagccttggatttacgctacgtccaatctcgcttctggagttcctgttaggttctcaggcagtgggtcaggaacatcctacagcttgacaatctctagagtggaggctgaggacgctgccacctactactgccaacagtggacatcaaatccacctactttcgggggggggacaaaactggagattaaaagaaccgtggccgctccttcggttttcatcttccccccatccgacgagcagttgaagtctggaacagctagcgtggtctgcctcctcaacaatttttatcctcgagaggccaaagtacagtggaaagtagataatgctctgcagtccgggaacagccaggagtctgttactgaacaggactccaaagattctacgtattccctgagtagtacacttacattgtctaaggcagattacgagaaacataaagtgtatgcatgcgaggtaactcatcaaggcctctcatcccctgtgaccaagtccttcaacaggggagaatgc

SEQ ID NO: 15454 - DNA, 711 bp, synthetic construct
  misc_feature 1..711: note = source = /note="Description of Artificial Sequence: Synthetic coding sequence"
  source 1..711: mol_type = other DNA
atggcagtcatggctcctcgtactctagtactgctgctctccggagcccttgccctaacacagacctgggcccaaatcgtgctgtcccagtcacccgctatactctcagccagccccggggagaaagtgacaatgacttgcagagctagcagctctgtcagttacattcattggtttcagcagaagcctggatcgtcccccaagccgtggatctatgccacttccaatcttgcctccggcgtgcccgtccgcttctcagggtcgggatctggcacaagctattcactgaccatcagtagggttgaggcagaagatgctgcgacttactattgccagcagtggacgtccaatccacctaccttcgggggaggaactaaactggaaataaagcggacagtggccgcacccagcgtcttcatctttcccccctcagacgaacagctgaaatcgggtaccgcgagtgtggtgtgtctcctgaataatttctatccgcgcgaagccaaggtccagtggaaagtcgacaatgccctgcagtccggtaattcccaggaaagcgtcactgagcaggacagcaaggatagcacgtactcactcagcagtaccctgaccttgtccaaggcggattatgaaaagcacaaagtctatgcctgtgaagtgacacatcaggggctgagcagccccgttaccaagtcatttaatcgaggtgaatgc

SEQ ID NO: 15455 - DNA, 711 bp, synthetic construct
  misc_feature 1..711: note = source = /note="Description of Artificial Sequence: Synthetic coding sequence"
  source 1..711: mol_type = other DNA
atggctgtcatggcacctcgcactttggtgctcctccttagcggcgcgctcgcactgactcaaacctgggcacaaatagtgctctcccaatcccctgcgatcctttcagcatcgccgggagaaaaggtgaccatgacgtgtcgggcatcgtcatccgtgtcgtacattcattggtttcagcaaaagcccggatcgtccccgaaaccatggatctacgcaacctctaacttggcaagcggtgtgcccgtcagatttagcggttccgggtcaggtacgtcctactcgcttactatctcacgagtggaggccgaggatgcagcaacttactactgtcaacagtggacttcaaatccaccaacttttggcgggggtaccaaacttgaaatcaaacgcacggtggcagcaccttcggtctttatctttcctccttcggacgaacaactgaaaagcggaaccgcaagcgtcgtgtgcctgcttaacaatttctaccctcgggaagcaaaggttcaatggaaagtggataacgcgcttcaatcgggaaatagccaggaatcggtaactgagcaagattccaaggattccacctactccctgtcgagcactctgaccctgagcaaagccgattatgaaaagcacaaggtctacgcatgtgaagtgacccatcaggggctttcgtcgccggtgaccaaatcctttaaccgcggagaatgt

SEQ ID NO: 15456 - DNA, 711 bp, synthetic construct
  misc_feature 1..711: note = source = /note="Description of Artificial Sequence: Synthetic coding sequence"
  source 1..711: mol_type = other DNA
atggccgtgatggcacccaggaccctggtgctcctgttgagcggggccttggccctgactcagacttgggcacagatagtgctcagtcagagtcccgcgattctgagtgcaagcccaggcgagaaagtcacaatgacctgcagggcttcctcttcagtgtcttatattcactggttccaacagaagcccggatccagtcctaagccctggatctacgccacttctaacctggcctctggagtaccagttagatttagcggatctgggagcggtacctcatattcactcactatttcgcgggttgaagccgaagacgcagctacctattattgccagcagtggaccagcaatccacctactttcggaggcggaacgaaactggagatcaagagaacagtggcagcaccaagtgtgttcatttttcccccaagcgacgagcagctcaagtcaggaacagccagcgtcgtgtgcttgctgaacaacttctacccccgggaggctaaggtgcagtggaaagtggacaatgccctgcagagtgggaacagtcaggagtccgtcactgaacaggattccaaggattcaacgtacagcctctcctccaccctgactctgagcaaagcggactacgaaaagcataaagtctacgcctgcgaggtgacacatcagggattgagctccccagtgactaagtcctttaaccgcggcgagtgc

SEQ ID NO: 15457 - DNA, 711 bp, synthetic construct
  misc_feature 1..711: note = source = /note="Description of Artificial Sequence: Synthetic coding sequence"
  source 1..711: mol_type = other DNA
atggctgttatggctccacgcaccctcgtgcttctgctgagcggtgcattggcactgacgcagacctgggctcaaatagtgcttagccagtcgccggcaattctgtcagcctcaccaggagaaaaagtgaccatgacttgtcgtgcctcctcgtcggtgtcgtacattcattggtttcagcagaagcctggctcgtcacctaaaccatggatttacgcaacttcaaacttggcaagcggcgtccctgtccggttttcgggatccggaagcggaacctcatactccctcacgatcagcagagtggaagccgaggatgcggctacctactactgccagcagtggacctccaacccaccaactttcgggggaggtactaagctcgaaatcaaaagaactgtggcagcaccttcggtgttcatttttccaccaagcgatgaacaactgaagagcgggaccgcatccgtggtctgtctgctcaacaacttttatccacgcgaggcgaaagtccaatggaaagtggataatgcacttcaatccggcaactcacaagaatccgtgaccgaacaagatagcaaggactcaacttactcgttgagctcgacgctgaccctgtcaaaggcagactacgaaaaacataaggtctacgcttgtgaagtgacgcatcagggtcttagttcgcctgtgactaagtcgtttaatcgtggtgaatgt

SEQ ID NO: 15458 - DNA, 711 bp, synthetic construct
  misc_feature 1..711: note = source = /note="Description of Artificial Sequence: Synthetic coding sequence"
  source 1..711: mol_type = other DNA
atggctgtcatggcaccccggacactggtcctgcttctgagtggtgctctggctctgacacaaacatgggcacaaatagtgttgtcccaaagtcctgccattctatcagcttcgccgggagagaaagtaaccatgacctgtcgagccagcagcagcgttagctacatccactggttccagcagaaaccaggctcaagccctaaaccatggatatatgctacaagcaacttggcatcaggcgttcccgtaagattctccgggtctgggagcggaaccagttattcactgacaatcagcagggtcgaagccgaggatgccgccacttattattgccagcagtggacaagcaaccctcccacattcggcggtgggacaaagctcgagatcaagagaacagtcgcggccccttcagtttttatttttcccccatcagacgagcagttgaagagcgggactgcgtccgtggtttgtctgctaaacaacttctaccccagggaggcgaaggttcagtggaaagtggataatgccctacagagcggcaatagtcaggaatccgttacagagcaggattccaaggactcaacatattccctcagtagcacactgaccttaagcaaagcagactacgaaaaacataaagtgtacgcttgcgaagtcacccaccaaggactttcgagtcctgtcacgaagagctttaacaggggcgaatgt

SEQ ID NO: 15459 - DNA, 711 bp, synthetic construct
  misc_feature 1..711: note = source = /note="Description of Artificial Sequence: Synthetic coding sequence"
  source 1..711: mol_type = other DNA
atggcagttatggcacccagaactttggtgctgctgttgtcaggcgccctggccttgacacaaacatgggctcaaatcgtactgtcccagtccccagcaatcctcagtgccagcccaggcgagaaagtcacgatgacctgtcgcgcatccagttcagtgtcttacattcattggtttcagcagaagcccggatcttcccccaagccctggatttacgccaccagcaacctggcttccggtgtacccgtgaggttttccggatccggtagcggtacaagctattccttgacgatctcccgcgtcgaggccgaagacgctgcgacatattactgccagcaatggacgtcaaatccgccgaccttcggtggaggaactaagttggagatcaagagaacagtggctgccccctctgtttttatttttccacctagcgacgaacagctcaaatccggtacagcaagcgttgtttgcctcctcaataatttctacccacgcgaggccaaggttcagtggaaggtggacaatgcactccaatcaggcaactcccaagagtcagtcactgaacaagatagcaaagatagtacttatagtctctctagtacacttacactctccaaggcggactatgaaaagcacaaggtttatgcttgtgaggttactcatcaaggtctgtcttctcccgtcacgaaatcttttaacagaggagagtgc

SEQ ID NO: 15460 - DNA, 711 bp, synthetic construct
  misc_feature 1..711: note = source = /note="Description of Artificial Sequence: Synthetic coding sequence"
  source 1..711: mol_type = other DNA
atggccgtgatggctcccaggacactggtactgctgctttctggggcccttgctctcacacaaacatgggcgcagatagtgctctcacagtcaccagccatcctcagtgccagtcctggggaaaaagtcacaatgacatgtagggcctcatcttccgtgtcttatatacactggttccagcaaaaaccaggatcttccccaaaaccttggatctatgcaactagtaacctagcgtctggggttcccgtgagattctccgggagtgggtcggggacttcctactctttgactatttctcgtgtcgaggcagaggacgctgcaacatactactgtcagcagtggacaagtaacccacctacattcgggggggggactaaactcgaaatcaaaaggacagtggcggccccctccgtgttcatttttccacccagtgatgagcaattaaaatctgggacagcctctgtcgtttgtctgctcaataatttttatccccgagaggccaaagtgcagtggaaagtcgataacgccctacagtcagggaattcacaggaaagtgtaactgaacaggactcgaaagatagtacttattccttatcctcgacacttacactatctaaagcagattatgaaaagcataaggtgtacgcttgcgaggtgactcatcaggggctgtcctcccccgtgacaaaatctttcaaccggggggaatgc

SEQ ID NO: 15461 - DNA, 711 bp, synthetic construct
  misc_feature 1..711: note = source = /note="Description of Artificial Sequence: Synthetic coding sequence"
  source 1..711: mol_type = other DNA
atggctgtgatggccccacgaaccctcgttttgctgctgtctggcgcattggctttaacccagacctgggcgcagatcgtcctctcacagtctccagccatcctctctgcctcacccggtgagaaagtcactatgacctgcagggcttcttccagtgtttcatacatccactggtttcagcagaagccgggcagcagcccaaaaccttggatttacgcgacttccaatcttgcctctggtgtcccggttaggttctctggatccggctctgggacctcctattcgcttactatctctagggtggaagccgaagacgctgctacgtactattgccagcagtggacatcaaacccaccaactttcggcggcggcacaaaattggagataaagaggaccgtggccgctcctagcgtgtttatcttcccaccaagcgacgaacaactgaagtccggaaccgcctccgttgtctgcttgcttaacaacttctaccccagagaagccaaggtccagtggaaagtggacaatgctctccagtccggtaacagtcaggagagcgtcactgaacaggacagcaaggattcaacatacagtttgtcttccaccctgaccctcagcaaggctgattatgaaaagcacaaagtttatgcctgtgaagtgactcaccaggggctctcttcgcccgtcacaaaatccttcaatcgaggcgagtgt

SEQ ID NO: 15462 - DNA, 711 bp, synthetic construct
  misc_feature 1..711: note = source = /note="Description of Artificial Sequence: Synthetic coding sequence"
  source 1..711: mol_type = other DNA
atggctgtgatggccccgcgcactctcgttctgctgctgtccggtgcgttggccctgactcagacgtgggcacagattgtcctgtcgcagtccccggccatcctgagcgctagccctggggagaaagtgactatgacctgccgcgcgagttcgtcggtgtcctatattcactggttccagcaaaaaccgggcagctcaccgaagccgtggatctacgcgacctcaaatctggccagcggagtcccggtgagattctccggctccggcagcggaacgtcttactccctcacgatcagccgggtcgaggctgaagatgcagcaacttactactgccaacagtggaccagcaaccctcctacttttggaggaggaactaagttggaaatcaaaaggaccgtggcggcgccgtcagtgttcatattcccgcccagcgacgagcaactgaagtccggaaccgccagcgtcgtctgcctcctgaacaacttttacccgcgggaagccaaagtacagtggaaggtggacaacgctctccagtcgggcaattcgcaagaaagcgtcactgagcaagactcgaaagattccacttactcgctctcgtcgaccttgacgttgtccaaggctgattacgaaaagcataaagtttacgcgtgtgaagtgacgcaccagggactctccagcccggtgaccaagtcattcaatcggggtgaatgc

SEQ ID NO: 15463 - DNA, 711 bp, synthetic construct
  misc_feature 1..711: note = source = /note="Description of Artificial Sequence: Synthetic coding sequence"
  source 1..711: mol_type = other DNA
atggctgttatggcgcctaggaccctggtgctgctgctgagcggcgcgttagcgctgactcagacgtgggcccagattgtcctgagccagtcaccggcgattctgagcgcaagccctggcgagaaagttacgatgacttgtcgtgcaagctcaagcgtctcgtatattcattggtttcagcagaagcctgggtcttcgccgaagccttggatttacgcaacaagtaatctggctagcggcgtcccggttcgcttctcaggtagtggttccggtacaagctactctctcacgatctcgcgcgtggaggctgaagatgcagcgacgtactactgccagcaatggacctccaatccgcctaccttcggtggtgggaccaagctcgaaattaagcgcacggttgcggcgccttctgtctttatctttccgccatccgatgagcagctgaaatcagggaccgcaagcgtggtttgtttgctgaataacttctatccgcgtgaagcgaaagttcaatggaaggtggataatgcgttgcagtcaggtaacagccaggaatccgttacagaacaggacagcaaagatagcacctatagcctgagcagcacgcttacgctgagcaaagccgactacgagaaacacaaagtctatgcttgtgaagtaacacaccaggggctgagctcgccggttaccaagagcttcaaccgcggcgaatgc

SEQ ID NO: 15464 - DNA, 711 bp, synthetic construct
  misc_feature 1..711: note = source = /note="Description of Artificial Sequence: Synthetic coding sequence"
  source 1..711: mol_type = other DNA
atggccgtcatggcgccgaggacattggtactgttgttgagcggcgcccttgccctgacccaaacttgggcccaaattgtgctgtcacagtcccctgccatcctgtcggcgtctcccggcgagaaggttaccatgacgtgtcgggcctccagtagtgtatcttatatccattggtttcagcagaagcctggatccagtcctaagccttggatctacgcaacctctaatctagcaagcggagtacccgtgagattcagtggtagcggatcagggacgagctactctctgactatatctagggtcgaagctgaggacgcagcaacttattattgtcagcagtggacttcaaatcctcccactttcgggggcggcacaaaactcgagattaagcgcaccgtggcggctccatctgtcttcatctttccccctagcgacgaacaactcaaatctgggaccgccagcgtggtctgcctcctgaacaatttttatccccgtgaggccaaggtacagtggaaggtggacaacgcactacaatctgggaactcccaggagtcagtcaccgaacaggactccaaggatagcacctattcactgtccagtactctcactttgtccaaggctgattacgagaaacataaagtgtacgcctgcgaagttacccatcagggactgagtagtccggtcacaaagtccttcaaccgaggggagtgt

SEQ ID NO: 15465 - DNA, 711 bp, synthetic construct
  misc_feature 1..711: note = source = /note="Description of Artificial Sequence: Synthetic coding sequence"
  source 1..711: mol_type = other DNA
atggctgtgatggcaccaagaacgcttgtcctcctcttgtctggcgctctcgctctgacccagacctgggcccaaatagtcctgagccagagccccgctatcctgtccgctagccctggagaaaaggttacgatgacctgtcgcgcttcctcgagcgtgtcctacattcactggtttcaacagaaaccggggtcatctcccaagccatggatatatgctacttctaacctggcctccggtgtacctgtgagatttagcgggagcgggagtggcacatcttacagtttaaccatttctagggtggaggccgaggacgccgcgacatattattgtcaacagtggacaagcaatcctcctactttcggcggggggaccaaactggagatcaagagaacagtggccgcaccgagcgtcttcatttttccacctagcgacgagcagctcaaatctggaacggcctccgtggtgtgtctgctcaacaacttctatccgcgtgaggctaaggtgcaatggaaagttgacaacgcactgcagtcgggcaattcccaagagtcagtgaccgagcaggattcaaaggactcaacatactccttatcttcgacactcacactgtcaaaggccgattacgagaaacataaagtgtacgcgtgcgaggtaactcaccagggcctgtcctcacccgtgactaagagcttcaaccgcggggaatgc

SEQ ID NO: 15466 - DNA, 711 bp, synthetic construct
  misc_feature 1..711: note = source = /note="Description of Artificial Sequence: Synthetic coding sequence"
  source 1..711: mol_type = other DNA
atggccgtcatggcgccgagaactctggtcctcctcctctcaggcgccttggcacttactcagacctgggctcagattgtcctgtcacaatcgccggccatcctcagtgcttcgcccggcgagaaggtgaccatgacttgtagggcttcttcctcagtcagttatatccactggttccagcagaaaccgggctcaagccctaagccctggatctacgccacttctaacctggcctcgggtgtcccggttcgcttcagcggctctgggagcggaacttcatacagcctgaccatctctcgagtggaggcggaagacgccgcgacctactactgccagcaatggacttcgaacccgccaaccttcggaggagggacgaagctcgaaatcaagcggactgtggcggcaccctccgtgttcatcttcccacctagcgacgagcagctgaagtccggtaccgcatcggtcgtctgcctcctgaacaacttttacccacgcgaggcgaaggtgcaatggaaagtggataatgcgctccaaagcggaaattcgcaagaatcggtgaccgaacaggactccaaggattcgacgtactccctcagttccacgctcactttgagcaaggcggactacgaaaaacacaaagtttacgcatgcgaagtgacccatcagggactgtcatctccggtgaccaagtcgtttaatcggggagagtgt

SEQ ID NO: 15467 - DNA, 711 bp, synthetic construct
  misc_feature 1..711: note = source = /note="Description of Artificial Sequence: Synthetic coding sequence"
  source 1..711: mol_type = other DNA
atggcggtgatggcgccgcgaactctggttctcctgttgtcgggagcactcgctctgacccaaacctgggcccaaatcgttctgtcacagtcaccggcaatcctgtccgcgtcaccaggagagaaggtcactatgacctgcagagcgtcatcctccgtctcgtacatccattggtttcaacaaaagccgggatcgtccccaaagccgtggatctatgcgacctccaatcttgcttcaggagtgccggtccggttctccggttcgggtagcggtacttcatattcactcacgatatcccgggtggaagctgaggacgcggctacttactactgtcagcagtggactagcaaccctccgaccttcggaggtggaactaaattggaaatcaagcgcacggtggcagcaccgtccgtgtttatcttcccaccatccgacgaacagctgaaatccgggaccgcctcagtggtgtgtctgctcaataacttttaccctcgggaagccaaggtccagtggaaagtggacaacgcacttcagagcggaaattctcaggaatcagttacggagcaggattccaaagacagcacctactccctgagttccactctcaccctctcgaaggccgattacgagaagcacaaggtgtacgcctgcgaggtcacccaccagggactttcgagcccagtgactaagtccttcaatagaggggaatgc

SEQ ID NO: 15468 - DNA, 711 bp, synthetic construct
  misc_feature 1..711: note = source = /note="Description of Artificial Sequence: Synthetic coding sequence"
  source 1..711: mol_type = other DNA
atggcggtgatggccccccggacccttgtgttgctgttgtcaggagccctggccctcactcagacctgggcgcagatcgtcctctcgcagagcccggcgatcctctctgcgtcacctggcgagaaggtcaccatgacttgtcgcgcttcctcaagcgtgagctacatccactggttccaacaaaagccaggaagctcgccgaagccgtggatctacgcaactagtaatcttgcctcgggagtgcccgtgcgcttctccggctcaggttcgggaacctcgtactccctgactatttccagagtcgaagctgaggacgccgcaacttattactgccaacagtggacctcgaaccctccgaccttcggcgggggaactaagctggagatcaaacgaactgtggctgcaccgtccgtctttatttttcctccgtccgatgaacagctgaaaagcggaaccgcctctgtggtgtgcctgctgaacaatttctacccacgggaagccaaggtgcagtggaaggtcgacaacgcactgcagagcggaaactcccaagagagcgtcacggaacaagactcaaaagattcaacctactcgctgagctccactctcaccctgtcgaaagcggactacgagaagcacaaggtttacgcctgcgaagtgacgcatcaggggctctcgtccccagtgaccaagtcattcaataggggtgaatgc

SEQ ID NO: 15469 - DNA, 711 bp, synthetic construct
  misc_feature 1..711: note = source = /note="Description of Artificial Sequence: Synthetic coding sequence"
  source 1..711: mol_type = other DNA
atggccgtgatggcgccacgtactttggtccttcttctttcgggagcacttgcgctcacccagacctgggctcagatcgtgttgtcgcaaagccctgccattttgtcagcatcccccggggagaaagtgacgatgacttgtcgcgcatcgtcgtccgtgtcttacatacattggttccagcagaaacctggttcatctcctaagccgtggatttacgcgaccagcaatctggctagcggagtgcctgtcagatttagcggttcaggttcagggacctcgtactcgctgactatctcccgggtcgaagcagaggatgctgcaacctactactgtcaacaatggaccagcaacccacccacctttggagggggtaccaagctggagattaaacgaactgtcgcagccccatccgtctttatctttcccccttcagacgaacaacttaagtcgggcactgcctcggtcgtgtgcctgctgaataacttttacccacgcgaagcaaaggtgcagtggaaagtggacaatgcgctgcaatccggcaactcacaagaatcggtcaccgaacaggactcgaaggattcgacctacagcctgtcctcgaccctgaccctctccaaggcagactacgaaaaacataaagtctacgcttgcgaggttactcatcagggcctttcgtccccagtgaccaagtcgttcaatcggggagaatgt

SEQ ID NO: 15470 - DNA, 711 bp, synthetic construct
  misc_feature 1..711: note = source = /note="Description of Artificial Sequence: Synthetic coding sequence"
  source 1..711: mol_type = other DNA
atggcagtcatggccccaagaaccctggtcctactccttagcggcgctttggcattgacacaaacatgggctcaaatcgttctgtctcaatcacccgccatacttagcgcttcccctggcgagaaagtgaccatgacttgcagagccagcagctccgtcagctatatccattggttccagcagaaaccaggctcgagccccaagccgtggatttacgccacttcgaacttagcctctggtgttcccgttaggttcagcggatctggaagcggcacctcatacagtctgacaatttctagggtggaagccgaggatgccgctacctactactgccagcagtggacaagcaacccacctaccttcggcggaggcaccaagctggagattaaacgcacagttgcggccccctcagtgtttatttttccccctagtgacgagcagctgaagtctggcaccgcctccgttgtgtgcctcttgaataatttctaccctagagaagctaaggtccagtggaaagtcgacaacgccctccagtcaggcaacagccaggagagtgtgactgagcaggactcaaaggattctacatatagccttagttccacactgacactttccaaggcagactatgagaagcacaaggtgtatgcatgcgaggtcacacaccagggcttgagctcacctgttaccaagagttttaaccgaggagagtgc

SEQ ID NO: 15471 - DNA, 711 bp, synthetic construct
  misc_feature 1..711: note = source = /note="Description of Artificial Sequence: Synthetic coding sequence"
  source 1..711: mol_type = other DNA
atggcagtgatggctcctaggactctcgtgctccttcttagcggggccctggcactgacccagacttgggcgcagatagtcctctcccagtccccagcaattttgtccgcgtcaccgggagaaaaggttactatgacgtgccgtgcctcatcctccgtttcgtacatacactggtttcaacagaagcctggttcgtctcctaaaccctggatttatgcgaccagcaacttggcatccggagtgcctgtgcgtttctccggctcagggtccggtacttcgtactcactgaccatttcgagagtggaggctgaagatgccgccacctattactgccaacagtggacttccaacccgccaacttttggtggcggaaccaagctcgagataaagcggacggtggcagctccatcagtctttatcttcccaccatcggatgagcagctgaaatctggaactgcatcagtcgtgtgtctcctgaataacttctaccctagagaagcaaaggtgcaatggaaagtcgacaacgcattgcaaagcggtaactcacaagaatccgttaccgagcaagattcaaaggactcaacctactcactgtcatcgactctgaccctgtccaaggcggattatgaaaaacataaagtctacgcttgcgaagtgactcaccaaggacttagctcgcctgtgactaagtcgtttaaccgcggtgaatgt

SEQ ID NO: 15472 - DNA, 711 bp, synthetic construct
  misc_feature 1..711: note = source = /note="Description of Artificial Sequence: Synthetic coding sequence"
  source 1..711: mol_type = other DNA
atggcagtgatggcgcctcgtactcttgtgttgctcctctcgggcgcactcgcacttactcaaacctgggcacagatcgtcctgtcacaatcacccgccatactgagcgcatccccaggagaaaaggtcacgatgacctgtagagcgtcatcaagcgtctcatacatccactggttccagcaaaagccgggaagcagccctaagccatggatctacgccacttcaaatcttgccagcggtgtcccagtgcggttttcaggtagcggatcaggaacttcgtactcgttgacgatatcccgcgtcgaagccgaagatgcagcaacttactattgtcagcagtggacgtccaaccctcctaccttcggtggagggactaaacttgaaatcaagcggaccgtcgcagcacctagcgtgtttatctttcccccttcggatgagcagctcaaatccggtaccgcgtccgtggtgtgtctgctcaacaacttttacccgcgggaggcaaaggtccagtggaaggtggataatgccctccaatcgggaaacagccaagagtccgtgactgaacaagacagcaaggattcaacttatagcctctcgtcaaccctgacgctgtccaaagcagactacgaaaaacacaaggtttacgcatgcgaagtgacccatcaagggctgtcatcgcctgtgaccaagtcctttaaccgaggagagtgt

SEQ ID NO: 15473 - DNA, 711 bp, synthetic construct
  misc_feature 1..711: note = source = /note="Description of Artificial Sequence: Synthetic coding sequence"
  source 1..711: mol_type = other DNA
atggctgtgatggccccacggactttggtgctcctcctatcaggcgcactagctctgacgcagacctgggctcagattgtgctttcccaatccccggccattttgtcggccagtccgggggaaaaggtaacaatgacgtgtcgcgcctcttcctccgtgagttatatccactggtttcagcagaaaccaggaagttcaccaaagccctggatctacgccacttctaacctagcttccggtgtaccagtgcggttttccggatccggtagtgggaccagctactcactcaccatctctcgagtcgaagcagaagatgccgccacatactattgccaacagtggacgagcaacccacctacattcggcggcggaaccaaactggagattaagaggaccgtggccgcacccagcgttttcatctttccacctagtgacgaacagttgaagtccggcacagcatccgtggtctgtcttttaaataatttttacccgcgggaggcgaaggttcagtggaaggtcgacaatgctctgcagtccggcaactctcaggaatcagtgacagagcaggactctaaagactccacctactcactcagcagcactctgaccctgagcaaagctgattatgagaaacataaggtatatgcatgtgaagttacacaccaggggctatcaagcccagtgacaaagtcttttaataggggcgagtgc

SEQ ID NO: 15474 - DNA, 711 bp, synthetic construct
  misc_feature 1..711: note = source = /note="Description of Artificial Sequence: Synthetic coding sequence"
  source 1..711: mol_type = other DNA
atggcggtgatggcgccgcggaccctcgtgctccttctctcgggagcactggcactgactcagacttgggctcagatcgtcttgagccagagccccgccattctgagcgcgagcccaggggaaaaagtgactatgacctgtcgagcgtcatcctccgtctcatacatccactggttccagcagaagccgggaagcagcccgaagccatggatttacgcgactagcaacctggcgtcaggagtgcctgtgagattcagcggttcaggatccggcaccagctactcactcactatctcgagagtcgaggcagaggacgccgcgacctactactgccagcaatggacctccaaccctccgactttcggcggaggaaccaagctggaaatcaagagaaccgtcgctgccccttcggtgttcatttttccgccgtctgatgagcagctcaaaagcggaactgcgagcgtggtgtgccttttgaacaacttctacccaagggaggcgaaggtccaatggaaggtggataatgccctgcaatcgggaaactcccaggagagcgtgaccgaacaagactctaaggactcaacttactcgctcagctcaactctgacgctgtcgaaggccgactacgaaaaacacaaggtgtacgcatgtgaagtgacccaccagggtctgtcgagcccagtcaccaagtcgtttaatcgcggagaatgc

SEQ ID NO: 15475 - DNA, 711 bp, synthetic construct
  misc_feature 1..711: note = source = /note="Description of Artificial Sequence: Synthetic coding sequence"
  source 1..711: mol_type = other DNA
atggcggtgatggcccctcgcaccctggtgctccttctgtcaggggctctggctctgacccagacctgggcgcaaatcgttctgtcacagtcacccgccatccttagcgccagcccaggtgaaaaggtaactatgacatgtcgagcatcatcaagtgtgtcgtacatccattggttccaacagaaacctgggtcatctcccaagccttggatttatgccacctccaatttggcctctggggtacctgtgagatttagcggctctggctcaggcacctcatattcactcacaatcagccgcgttgaggcagaagacgcggcaacctattattgccaacagtggacttctaacccccctacatttggtggaggtaccaaacttgagataaagcgcaccgtggctgcaccatccgtgtttatcttcccaccttctgacgagcaactgaagtctggcaccgcttctgtggtctgtttgctgaacaacttctacccccgtgaggctaaggtccagtggaaagtggataacgctctgcaatccggcaactctcaggagtcagtgaccgaacaagattctaaggattccacatactccctcagctcaactttgaccctctcaaaggcagattacgagaagcacaaggtatacgcctgtgaggtcacacaccaaggcctgtcttctccagtgacaaagtctttcaatagaggcgagtgt

SEQ ID NO: 15476 - DNA, 711 bp, synthetic construct
  misc_feature 1..711: note = source = /note="Description of Artificial Sequence: Synthetic coding sequence"
  source 1..711: mol_type = other DNA
atggcagtcatggccccacgcaccctcgttcttctccttagcggtgccctggccttgacgcaaacttgggcacaaatagtcctttcccagtcaccggctattctcagcgcgtcgcctggagaaaaagtgaccatgacttgtcgagcctcgtcctcagtgtcctacatccattggtttcagcagaagcctggatcgtcacccaagccttggatttacgctacctctaacctggcgtcaggagttcctgtgagattttcgggttccgggtccgggacttcatactcgctgaccatttcgcgtgtggaggcagaggacgcggcaacttactactgccagcaatggactagcaacccacccacctttggcggtggcacgaaattggagattaagcggactgtggcagctcctagcgtgttcatcttcccaccttcagatgaacaactcaagagcggcaccgcctctgtcgtctgtcttttgaataacttttaccccagggaagccaaagtacagtggaaggtggataatgcactccagtcaggaaattcccaagaatcggtgactgaacaagactccaaagattcgacctatagtttgtcgtctactctgactctgtcgaaggcagattacgagaagcataaggtatacgcatgcgaagttacccaccaaggactgtcgtccccagtgaccaagtcttttaaccggggagaatgt

SEQ ID NO: 15477 - DNA, 711 bp, synthetic construct
  misc_feature 1..711: note = source = /note="Description of Artificial Sequence: Synthetic coding sequence"
  source 1..711: mol_type = other DNA
atggccgtcatggcacctaggactttggtgctgttgctcagcggtgcacttgccctgacccaaacttgggcacaaatcgtgctgtcccaaagccccgcaattctctcggcatcgcccggagagaaggtgaccatgacttgtcgagcatcaagctcggtgtcttacatacattggtttcaacagaaaccaggatcatcgcccaagccgtggatctacgcgacctcaaatttggcctccggggtccccgtgaggttctcggggtcaggctccgggacctcctactccctcaccatttcgcgtgtcgaagcggaggatgcagcaacttactactgccaacagtggacctcaaaccctccaaccttcgggggcggcaccaagctggagatcaaacgcaccgtcgcggctccaagcgtgttcatttttccacctagcgatgagcaattgaagtccggaaccgcatcagttgtctgccttctcaataacttttacccgcgtgaagcaaaggtgcagtggaaggtcgacaatgcacttcagagcggaaacagccaagaatcagtgactgagcaggactccaaggactccacttattcactgagctccactctgactctctcgaaggcagattacgagaagcacaaggtctacgcgtgcgaagtaacgcaccaaggcctgtcctcgcctgtgactaaatcctttaaccgaggtgagtgt

SEQ ID NO: 15478 - DNA, 711 bp, synthetic construct
  misc_feature 1..711: note = source = /note="Description of Artificial Sequence: Synthetic coding sequence"
  source 1..711: mol_type = other DNA
atggccgttatggcaccacgcaccctggtcttgttgctaagtggagccctcgccctcacgcagacttgggcacagattgtcttgagccagtctcctgcaattctttctgcctcgcctggtgagaaggtgaccatgacttgtcgggcttcatccagtgtttcttacattcactggttccagcagaagcccgggtcttctccgaagccatggatatatgccaccagcaatctggcttccggcgtgcctgtgaggttctccggatctgggtccggaactagttatagcctcacaatctctcgcgtggaggccgaagacgcagctacgtattactgccagcagtggaccagtaatccccccaccttcgggggcggaaccaagcttgaaattaagaggacagtggccgcaccatcagttttcattttccctccttctgacgagcagctgaagtccggaaccgcctcggtcgtttgcctgctgaacaatttctacccccgagaagccaaggtgcagtggaaggttgataatgccttgcaatcggggaactcccaagagagtgtgacagaacaggacagcaaagatagcacatatagtctctcctctacactgacactgagcaaggcggattacgaaaagcataaagtgtacgcttgcgaggtcacacaccagggcttgtcatccccagttactaagtcattcaaccgaggagaatgc

SEQ ID NO: 15479 - DNA, 1467 bp, synthetic construct
  misc_feature 1..1467: note = source = /note="Description of Artificial Sequence: Synthetic coding sequence"
  source 1..1467: mol_type = other DNA
atggctcccgtggcagtgtgggctgcactcgcggttggacttgaactctgggcagcggctcatgcactgcctgcccaggtcgcgttcacgccatacgcaccagaaccaggttccacttgcagactgagagaatactacgatcagactgcgcagatgtgttgttcgaagtgttccccagggcagcatgctaaggtgttttgcaccaagacgagcgacacggtctgtgattcgtgtgaggattcgacttacacgcaactctggaactgggtcccagaatgtctgagctgtggatcgcgttgctcctccgatcaagtggaaacccaggcctgcaccagagaacagaatcgaatttgtacctgtaggcctggttggtactgcgctcttagcaagcaagaaggctgtaggctgtgcgcaccacttagaaaatgccgaccaggctttggcgtggccagaccaggtaccgaaactagcgacgtggtctgtaagccgtgtgcccctggaaccttttcaaatactacctcctccaccgacatctgtagacctcatcagatttgtaatgtcgtggcaatcccggggaacgccagcatggatgcggtctgtacttccacctcccctaccagatcgatggcgcccggtgcagtgcatctgccacaaccagtgtccactcgttcccaacacactcagccaactccagaaccatcaaccgctccttctacctcctttctgctccctatgggtccttcgccccctgcagaaggatccaccggcgacgaaccaaagtcctgcgacaagacgcatacctgtcctccgtgtcccgcacctgagctgcttggtggaccatcagtattcctttttcctcccaagccaaaggatactttgatgattagcaggactcctgaagtcacttgcgtggtcgtcgatgtgtctcatgaagatcccgaagtgaaattcaactggtacgtggacggtgtggaagtccataacgcaaaaaccaagccacgtgaagagcagtacaattcaacttaccgcgtcgtttcggtgttgactgttcttcaccaggactggctgaacggaaaagagtataagtgcaaggtcagcaacaaagcacttccagcacctatagaaaaaacgattagcaaggctaaaggacagccgcgtgaaccccaggtgtacactctcccaccctccagagaagaaatgaccaagaaccaagtctccctgacctgcttggtgaagggattctacccttctgatattgcagtggaatgggaatcaaatggacagcctgagaacaactacaaaaccacccctccagtgctggattcagacgggtcatttttcctctactcgaagctgaccgtcgataagtcgcgctggcaacagggaaacgtgttttcctgctccgtgatgcacgaagcacttcacaaccattacactcaaaaatccctttcgctgtcgcctggaaag

SEQ ID NO: 15480 - DNA, 1467 bp, synthetic construct
  misc_feature 1..1467: note = source = /note="Description of Artificial Sequence: Synthetic coding sequence"
  source 1..1467: mol_type = other DNA
atggccccagtggcggtctgggcggcccttgccgtgggactcgagctctgggcagccgcacatgccctgccagctcaggtggccttcactccgtatgctccagaacctggctccacttgcaggctccgcgagtactacgatcagacggctcaaatgtgctgctcgaagtgctcgccgggacagcatgccaaggtgttctgcaccaaaacttctgatactgtgtgcgattcatgcgaggattccacctacactcaactctggaactgggtgccggagtgtttgagttgtggctcgagatgctcgtccgatcaggtggagactcaagcctgcactcgtgagcagaacagaatttgcacctgtaggccaggatggtactgtgcactttccaagcaggagggctgccggctctgtgcaccactgcgaaagtgccgcccgggatttggagtcgcacggccaggcaccgaaacctccgacgttgtctgcaagccgtgcgcccccggaactttctccaacaccacttcgtccaccgatatctgtcggcctcatcaaatttgtaatgtggtggccatcccaggaaacgcctcaatggacgcagtgtgcacgtccacgtcacctactagatccatggctccgggggcagtgcatctgccgcagccagtgtccaccaggtcccagcacacccaaccgaccccagaaccttctacggcgccttccactagcttcctgctgccgatgggaccgtcgccaccggcagaaggcagcactggagacgagccaaagtcgtgcgataagactcatacctgcccaccatgcccggcgccggaactgctcggggggccgtcggtctttctgtttccgccgaagcccaaggacactctgatgatctccaggacccccgaggtgacctgtgtggtcgtggatgtcagccatgaggatccggaagtgaagttcaactggtacgtggatggcgtggaagtccacaacgccaaaacgaagccgcgcgaagaacagtacaatagcacctaccgcgtggtcagcgtgctcaccgtgctccaccaagattggctgaacgggaaggagtacaagtgcaaagtgtccaataaggctttgccggcgcctatcgagaaaactattagcaaggccaagggacagccgcgggaaccgcaggtctacacgctgcctccgtcccgcgaggaaatgaccaaaaatcaagtcagcctgacttgcctggtcaaaggcttctacccatccgacatcgcagtggaatgggaaagcaatgggcagccggaaaacaattacaaaaccactccgccggtgcttgactcggacggatcattcttcctttactcgaagctgactgtggacaaatcccgttggcagcaggggaacgtcttttcgtgctcggtcatgcatgaggccttgcacaatcactatactcaaaaatccctgtcgctgtctccgggaaag

SEQ ID NO: 15481 - DNA, 1467 bp, synthetic construct
  misc_feature 1..1467: note = source = /note="Description of Artificial Sequence: Synthetic coding sequence"
  source 1..1467: mol_type = other DNA
atggctcctgtagcggtgtgggccgccttggcggtcggacttgaactttgggccgcggcacatgctttgccagcacaagtggcttttacaccctacgctccagagcctggttctacttgcagactgcgcgagtattatgatcagacagcgcaaatgtgttgcagcaagtgctcccctggacagcatgccaaggtgttctgcacaaagacttcagatacggtgtgtgacagctgcgaggacagtacttatactcagctgtggaactgggtgcctgagtgcctctcttgcggatccagatgttcatccgaccaggttgaaacccaggcgtgtacgagggagcagaacaggatctgcacttgcaggcctggctggtactgcgcgctgtcaaagcaggaaggttgccgcttgtgtgcccccctcaggaagtgccgccctggctttggcgtggctcgccctggtacagaaacctctgacgtggtgtgcaaaccatgtgcacctggaacattctctaatactacctctagtaccgatatctgccgccctcaccagatctgtaacgtggtcgccattccgggcaacgcatctatggatgccgtgtgtacatctaccagccccacaaggtccatggcgcccggagcagttcatctgccccagcccgtatccactagatcacaacatacccagcctacccccgagccttccactgctccatctacaagtttcctgctgccgatgggtccctcacctcccgcagaaggctcaacaggcgacgaaccaaagagctgcgataaaacgcacacttgtcctccatgtcctgctcctgagcttctgggaggtccatcagtgtttctttttcctcccaaacccaaggacaccctcatgatttccaggacccctgaagtcacgtgcgtcgttgtggacgtcagccacgaagatcctgaggtcaaattcaactggtacgtagacggtgtcgaagtccataacgcaaaaactaagccaagggaagaacagtataacagcacctaccgcgttgtgagcgtacttacggtcctgcaccaggactggttgaatggcaaggaatacaagtgcaaagtctccaacaaggctctgccagcgcccattgaaaaaacaatctccaaagctaaaggacaacccagagaaccgcaagtatataccctgcccccctcaagggaagagatgacaaaaaatcaggtttccttgacttgtctggtcaagggtttctacccaagcgatatagctgttgagtgggagtccaacggccagccagaaaacaactacaaaacaactccccctgtcctcgattccgatggttcctttttcctgtactctaagctgacagttgataagagtagatggcaacagggcaacgttttctcttgcagtgttatgcacgaagccctccacaaccattacacgcaaaaatccctgtctctctctcctggcaaa

SEQ ID NO: 15482 - DNA, 1467 bp, synthetic construct
  misc_feature 1..1467: note = source = /note="Description of Artificial Sequence: Synthetic coding sequence"
  source 1..1467: mol_type = other DNA
atggcaccagtggcagtctgggctgccctcgccgtaggcctggagttatgggcagccgcccacgcactgcctgcccaggtagccttcacaccatatgccccggagccgggcagtacctgccgtctgcgcgaatattacgatcagactgcccagatgtgctgtagcaaatgttcacctggccagcacgccaaggtcttctgcaccaagaccagcgacactgtatgcgactcatgtgaggactcaacctacactcaactgtggaactgggtccccgaatgtctgtcgtgtggttcaaggtgttcgtccgaccaggtggagacccaagcctgtactagggaacagaatcggatatgtacctgtagacccggttggtattgcgcactgtcaaaacaggagggatgcaggctgtgcgctccattgcgtaagtgtcgccctggtttcggtgtggccaggcctgggaccgaaacttccgatgtggtttgtaaaccatgtgctccaggaacattttccaatacaacctctagtactgacatatgtcgacctcatcagatttgtaacgtcgttgcaatacctgggaacgcctccatggatgcggtctgtacaagtacgtcaccgacccggtcaatggcccctggagccgtgcacttgcctcagccggtgagtacgaggagccaacacacgcagccgacccctgaacccagtaccgctcctagcacgagcttcctgctgccaatgggccctagtcctccggcagaaggtagtaccggtgacgagcctaagtcctgcgacaagacacatacatgtcctccctgtcctgccccagagctcctaggaggaccctccgtcttcttgttcccacccaaacccaaagacactctaatgatatccaggactccagaggtaacctgtgtcgtggtggacgtctctcacgaggatccggaagttaagttcaattggtacgtagacggagtcgaggtacacaatgcaaagaccaaaccgcgggaagagcagtacaactccacatatcgcgtagtgagcgtgttaactgtgttgcaccaggactggcttaacggcaaggaatacaagtgtaaggtgtccaacaaagcactccctgctcccatcgagaaaactattagcaaggctaagggccagccccgggagccccaagtgtatactctgcctccctcacgcgaagagatgacgaagaatcaagtgtctctgacatgcctggtcaagggcttttatccctctgatattgctgtggagtgggagagtaacggccagccggagaacaactacaaaactacacctcccgtattggactccgacggctcctttttcctctattccaagctcacagtggacaaatctcggtggcagcagggcaacgtcttctcctgtagtgtgatgcatgaggcattacacaaccactacacgcaaaaaagcctatcactttcacccggtaaa

SEQ ID NO: 15483 - DNA, 1467 bp, synthetic construct
  misc_feature 1..1467: note = source = /note="Description of Artificial Sequence: Synthetic coding sequence"
  source 1..1467: mol_type = other DNA
atggcgcccgtcgcagtatgggcagcccttgccgtgggattggagctgtgggcagccgcgcacgcactgcccgcgcaagtggcctttacaccctatgcacccgagccgggatcgacctgtaggctccgcgaatactatgatcagaccgcccagatgtgttgctccaaatgtagccccggacagcacgctaaggtgttttgtacaaaaacaagcgacacagtttgcgactcctgcgaggactcgacgtacacccagctctggaactgggtccctgagtgtctgtcatgtggaagtcggtgtagtagcgatcaggtggagacccaggcgtgcactagggaacaaaaccggatttgtacctgcaggcctggatggtactgtgccttgtccaagcaggaaggatgtcggttgtgcgcccctctgcgcaagtgtaggccaggcttcggggtcgctcgccccggcacagagacatccgacgtagtttgtaaaccttgcgctcctggaactttctctaacactacatccagcacagacatctgccggccccaccagatttgcaatgttgtggcaatccccgggaatgccagcatggacgctgtgtgcacaagtacttcacctacaaggtctatggccccaggcgcagtgcacttgccccaacccgttagtaccagatctcagcacacccagcctacacccgagccgtcaaccgcgccatcaacctcgtttctccttccaatgggcccatctccgcccgctgaaggcagtacgggtgatgagcccaagtcctgcgacaagacccacacttgcccgccttgtcccgctcccgaactcctgggcggacccagtgtattcttatttccaccaaagcctaaggatacacttatgatctctcgcactcctgaagttacttgtgtcgtcgtcgatgtgtcccatgaggatccggaagtgaagtttaactggtacgtggatggagtagaggtgcacaacgcaaaaaccaaaccaagggaggagcagtataatagtacctatagagtggtgtccgtattgacagttctgcaccaggactggcttaatgggaaggaatataaatgtaaagttagcaacaaggccctcccagcgccgatagaaaagaccatcagcaaagccaaaggacaaccacgtgaacctcaggtgtacacactgccaccaagcagggaagagatgactaagaatcaagtcagcctgacttgcctggttaagggcttctatccttcagatattgctgtggagtgggaaagcaacggtcagcctgaaaataattacaagaccactcctcctgtgctggactcagacggatcgttcttcctttactccaagttaaccgtagacaagagtcggtggcagcaaggtaatgtattcagctgttcggtcatgcacgaagctctgcataaccattacactcagaagtcactatcattgtcacccgggaaa

SEQ ID NO: 15484 - DNA, 1467 bp, synthetic construct
  misc_feature 1..1467: note = source = /note="Description of Artificial Sequence: Synthetic coding sequence"
  source 1..1467: mol_type = other DNA
atggccccggtggcggtgtgggcagcactggccgtgggactcgagctgtgggcggccgcgcacgccctgcctgcccaagtggccttcaccccgtacgcgccagagcctggcagcacctgccggctcagagagtactatgatcaaactgcccaaatgtgctgttcgaagtgctcccctggccagcatgcgaaggtgttttgtactaagacctcggacacggtgtgcgactcgtgcgaagatagcacttacacgcaactttggaactgggtgccagaatgcctgtcatgcgggtccaggtgctccagcgaccaagtggaaacccaggcttgcacgcgggagcaaaacagaatctgcacttgtcgccccggctggtactgtgcgctgtcgaaacaggagggatgtagactctgtgcgccgctgcgtaagtgcagacccgggttcggagtcgcccgccctggaactgaaacttcggacgtggtctgcaaaccttgtgcgccaggtaccttctccaacaccacttcaagcactgatatctgccggccacatcaaatctgcaatgtggtggccatcccgggaaacgcttcaatggacgcagtgtgtacttcgacctccccaacgcgctcaatggcgcctggggccgtgcatctgccgcagccagtctccactcgcagccagcacacccagccgactccagaaccgtcgaccgcgccttcaacgtcattcctgctgccaatgggaccgagcccgccggccgaaggaagcactggagacgaaccaaagtcgtgcgacaagacccacacgtgccccccgtgccctgccccggaactccttggagggccgtcggtgttcctcttcccaccgaagccaaaggacacgctgatgatcagccgcactcccgaggtgacttgcgtcgtcgtggacgtttcgcacgaagatcccgaagtcaagtttaactggtacgtcgacggcgtggaagtgcacaacgcaaagaccaagccgcgagaggagcagtacaactccacctaccgggtcgtctcagtgctcactgtgttgcatcaggattggctcaatgggaaggagtacaaatgcaaagtctccaataaggctctcccggcgccgatcgaaaaaaccatctccaaggccaagggacaaccgcgtgagccacaagtgtacacgttgccgccgagccgcgaagaaatgaccaaaaaccaggtgtcgctgacctgccttgtgaagggattctacccgtccgatatcgcagtggaatgggaatcgaatggacaacctgagaacaactacaagaccaccccaccggtcctggattccgatggcagcttctttctgtactcaaaacttaccgtcgataagtctcggtggcagcagggaaacgtgttctcctgttcggtgatgcacgaggcccttcacaaccactacactcagaagtcgttgagcctttccccgggcaag

SEQ ID NO: 15485 - DNA, 1467 bp, synthetic construct
  misc_feature 1..1467: note = source = /note="Description of Artificial Sequence: Synthetic coding sequence"
  source 1..1467: mol_type = other DNA
atggctcccgttgccgtctgggccgctttggcagtgggccttgagctttgggctgctgcacacgccctcccggcacaggtcgctttcacgccctacgcaccagaacccggaagcacgtgtcgtctacgcgagtattatgatcagacagcacaaatgtgctgcagtaagtgcagcccaggtcaacatgcaaaggtgttctgcacaaaaacgtctgacacagtctgtgattcctgtgaagactcgacgtacacccaattatggaactgggtgcctgaatgtctctcctgtggctcccgatgctcgagtgaccaagtggaaactcaagcttgcactcgagaacagaaccggatttgcacctgtcggccaggatggtactgcgcactgtcaaaacaggaggggtgtcgcttgtgcgctccactgcgtaagtgccgtccaggattcggcgtcgcgagaccaggaacggaaacctctgacgtggtgtgtaaaccgtgtgctccgggaaccttctctaacaccacctcaagcactgatatctgcaggccacatcaaatttgtaacgttgtagctatccctggaaacgcgtccatggacgccgtgtgcacgagcacgagtcccacccgctcgatggccccgggtgccgttcaccttccgcaaccagtctctactaggagccaacatacacaacctacccccgagccgtcgactgctccttccacgtcgtttttgctccccatgggcccgtcccccccagccgaaggttcgactggcgatgagcctaagtcatgcgacaagacccacacttgcccaccatgtcccgctcccgaactcttagggggtcctagcgtgttcctgtttccgcctaagccaaaggatacactgatgatcagccgaacccccgaagtcacttgcgttgttgtcgacgtttcacatgaagatcctgaggtaaagtttaactggtatgtcgatggagtggaagtccataatgcgaagaccaagccccgcgaagagcagtataattctacgtacagagtcgtgtccgtgctcaccgtcctgcatcaggattggctcaacggtaaagagtataagtgtaaggtttcgaacaaggccctccccgcccctattgagaagacgatcagcaaagctaagggtcagccgcgcgagccccaggtctatactcttcctccgtctcgtgaggagatgaccaagaaccaggtaagcttaacctgtcttgtcaaaggattttacccatcagatattgccgtagaatgggagtctaatggacaacctgagaacaactataagactactcctccggtcctcgactctgatgggtcattcttcctgtacagtaagttgacagtggataagtcacgatggcagcaaggaaatgtcttcagctgttcagtcatgcatgaggctttgcataatcattacacccagaagagtcttagtcttagtcccggcaag

SEQ ID NO: 15486 - DNA, 1467 bp, synthetic construct
  misc_feature 1..1467: note = source = /note="Description of Artificial Sequence: Synthetic coding sequence"
  source 1..1467: mol_type = other DNA
atggcccccgtggcggtctgggccgccttggctgtcggcctcgaactttgggcagcagctcacgctcttccagcgcaggtggcttttaccccttacgcgccggagcctggctcaacctgtcgtctgagagagtactacgaccagacagcccaaatgtgttgtagcaagtgctcacccgggcagcatgctaaggtcttttgtactaagacctcagacacggtctgcgacagctgtgaggatagcacctatactcagctttggaactgggtgcccgaatgtctgagctgcggcagccggtgtagcagcgatcaggtggaaactcaggcttgcacccgcgagcaaaacagaatttgcacatgcaggccaggctggtattgtgcactttctaagcaggaaggatgcagactgtgcgcgcctctcaggaaatgcagacccggctttggtgtggcaagacctggcactgagacaagcgatgtggtctgtaaaccgtgcgcccccgggacattcagcaacaccacctcatccaccgatatttgccgtcctcaccagatctgtaacgttgtagcaatccctggaaatgccagcatggatgcggtgtgcacctccacctcacctacacgatcgatggcaccgggagccgtgcacctgccacagccagtttcaacacgctcccagcacacacagcctacccctgagccatcaaccgctccttctacctcttttcttctcccaatgggcccttcccctcctgccgaaggaagcaccggcgacgaacctaagtcgtgcgataagacccatacatgcccaccctgccctgccccagaactcctcggaggcccctcagtctttctctttcccccaaaacccaaggataccttaatgataagcaggacacctgaggtcacctgcgtggtggtcgacgtcagccatgaggatcccgaggtgaaattcaactggtacgttgatggcgtggaagtgcacaacgctaaaacaaagccgagggaggaacagtacaacagtacctacagagtggttagcgtgctgacagttctgcaccaagattggcttaacggcaaagagtacaaatgtaaggtttccaacaaagccctgcccgcccccatcgaaaaaactattagcaaggccaagggtcaacctcgcgagccacaggtgtatacactgcctcccagcagggaggaaatgacgaagaaccaagttagcctgacatgtttagtgaagggcttttacccgtctgacatcgcagttgaatgggagtcaaacggacaacctgaaaacaactacaaaaccacccctccagtgcttgattccgacggaagcttctttttatactccaagttgactgtcgacaagtcacgctggcagcaagggaacgtgttcagctgttcagtcatgcacgaggccttacataaccactatacgcagaaaagcctctccttgagtcccggcaaa

SEQ ID NO: 15487 - DNA, 1467 bp, synthetic construct
  misc_feature 1..1467: note = source = /note="Description of Artificial Sequence: Synthetic coding sequence"
  source 1..1467: mol_type = other DNA
atggccccagtggccgtgtgggcagcgcttgcggtgggtctggaactctgggcagcagcacacgcccttccagcccaagtggccttcaccccttacgcgcctgaacccggctcgacgtgtcgtctcagagagtactacgatcagactgcacaaatgtgctgttccaagtgctcaccaggccagcacgctaaagtgttctgtactaagacgtcggacactgtctgtgattcgtgtgaagatagcacttatacgcaactgtggaactgggtcccagaatgcctctcatgtggctcccggtgctcatcggatcaagtggaaacccaagcatgtacccgagagcagaatagaatttgtacttgtcgccctggatggtactgcgcactttccaagcaggaaggttgccgtctttgtgcgccactgagaaagtgtagaccgggtttcggagtggccaggccgggaactgagacttccgatgtggtctgtaaaccgtgcgcaccaggaacctttagcaatacgacttcaagcacggacatttgtaggcctcaccaaatctgtaatgtggtcgcaatacccggaaacgcatcgatggatgcagtctgtacttcaacctcgcctacccgtagcatggcccctggagccgtgcatctccctcaaccagtctcaacccgttcgcagcatacgcaacccacccccgaaccgagcactgcgccttccactagcttcttgttgcctatgggaccgtcgcctccagcagagggaagcaccggcgacgagccaaagtcctgtgacaaaactcacacttgtcctccatgtcctgcaccggaacttctgggcgggcctagcgtgtttcttttcccacctaagccaaaagataccctcatgatttcccggacccctgaagttacttgcgtggtcgtggatgtgtcccatgaagatcccgaagtgaagtttaactggtatgttgatggggtggaagtgcataatgcgaaaacgaaacccagagaggaacagtacaacagcacttacagagtcgtctcggtgcttactgtgcttcaccaggactggctcaacggtaaggaatacaaatgcaaggtgtctaacaaagcacttcccgctccgatcgaaaagacgatttctaaggcaaagggtcaaccaagagagcctcaagtgtacaccctgccaccttcgcgtgaagagatgaccaagaatcaagtgtcgttgacctgcctggtgaagggcttttacccatccgatatcgcagtggaatgggaatcgaacgggcagccagaaaacaactacaagacgactcctcctgttctcgactccgacggatcgtttttcctctactccaagctgactgtcgacaagtctcggtggcaacagggaaacgtgttttcatgcagcgtgatgcatgaggcacttcataaccattacactcagaaatcgctgtcgctgtcacctggcaag

SEQ ID NO: 15488 - DNA, 1467 bp, synthetic construct
  misc_feature 1..1467: note = source = /note="Description of Artificial Sequence: Synthetic coding sequence"
  source 1..1467: mol_type = other DNA
atggcccctgtggcagtgtgggccgccctggctgtcgggcttgaactctgggccgctgcccacgcactcccggcgcaagtcgcgtttactccatacgccccagaaccgggatcgacctgccggctgcgcgagtactacgaccaaactgcacagatgtgctgcagcaagtgctcacccggacagcacgctaaagtcttttgtactaaaacctccgacaccgtttgcgacagctgtgaagattccacttatacccagctgtggaactgggtccctgagtgtctgagctgtgggtcgagatgttcttccgaccaggtcgagactcaggcttgcactcgtgaacagaacaggatctgtacttgccgcccgggttggtactgtgcgctttcgaagcaagagggatgccgtctctgcgctcctctgcgcaagtgcaggccgggattcggagtcgccaggccgggtaccgagacttctgatgtggtgtgcaagccgtgcgcgccaggaaccttctcgaataccactagctcaactgatatttgccgtccgcatcagatttgcaacgtcgtggcgatcccaggaaacgcaagcatggatgcggtgtgcacctcgacttccccaacgagatcgatggccccgggggcagtgcatctgcctcaaccggtcagcacccgatcacagcacacccagcccaccccggaaccatcgacggctccttctacgtccttccttctgccaatgggcccatccccgccagccgaaggttccaccggagacgaaccgaagtcctgcgataagactcacacctgcccaccgtgcccggcgcctgaactgctgggaggcccctcggtgttccttttcccacctaagcccaaagacactctcatgatctcccggactcctgaagtgacctgcgtggtcgtggacgtgtcgcacgaggacccagaagtgaagttcaactggtatgttgacggggtggaagtgcataatgccaagacgaagccgagagaggaacagtacaacagcacctaccgcgtggtgtccgtgctcaccgtgcttcatcaagactggttgaatggaaaagagtacaagtgcaaggtgtccaacaaggctttgcccgcgccgatcgaaaaaacgatctctaaagctaaaggacagcctcgggagccgcaggtgtatactctgccgccgtcacgcgaagagatgactaaaaaccaggtgagcctcacttgtctggtcaagggcttctacccgtcggatatcgccgttgagtgggagtctaatgggcagccggagaacaactacaagaccactccccctgtgctcgattcagacgggtcgttcttcctgtactccaaactgactgtcgataagtcgcgctggcaacaaggtaatgtctttagctgttccgtgatgcatgaagcactccacaatcactacacccagaagagcctctcgctgtcccctggcaaa

SEQ ID NO: 15489 - DNA, 1467 bp, synthetic construct
  misc_feature 1..1467: note = source = /note="Description of Artificial Sequence: Synthetic coding sequence"
  source 1..1467: mol_type = other DNA
atggcccctgtcgccgtgtgggccgcgctggccgtgggactggagctgtgggctgctgcccacgctctgccagctcaagtggcatttaccccgtacgccccggagcccgggtccacctgtagactgcgcgaatactacgatcaaaccgcccagatgtgctgctccaagtgcagccccggacagcatgcaaaagttttctgcacgaaaacctccgacactgtgtgtgactcgtgcgaggactccacgtatacccaactttggaattgggtgccggagtgcctctcatgtgggagccggtgcagcagcgaccaagttgaaactcaagcatgcactagagaacagaatcgaatttgcacttgcagaccaggctggtactgcgccttgtccaagcaggaaggatgccgcctctgcgcgccgctccgcaagtgccggccaggtttcggagtggcgcgtccgggaactgaaacctctgatgtcgtgtgtaagccctgcgctccgggaaccttctcgaacaccacctcgtcaaccgacatctgccggccgcaccagatctgcaacgtcgtcgcgatcccaggaaacgcaagcatggatgccgtctgcacttcaacctcccctactcgctcgatggcgccaggggcggtgcatctcccgcagcccgtgtcgactcggtcccagcatactcagcccactcctgaaccttcgactgcaccatcgacttcgttccttttgccaatggggccgtcaccccccgcagaaggatcgactggtgacgagccgaagtcctgcgacaaaacgcatacttgcccaccgtgtcctgccccggagctgctgggaggaccgagcgtgttcctgttcccgccgaagccgaaggacacgcttatgatctcacgcacgccagaggtgacctgcgtcgtggtggacgtgagccatgaggacccggaggtcaagtttaactggtacgtcgatggagtggaagtgcataacgcaaagaccaagccgagagaggaacagtacaactcgacttacagagtagtctccgtgctgactgtcctgcaccaggattggctgaacggaaaggagtacaaatgcaaagtgtccaacaaagccctgccggcccccattgagaaaacgatctcaaaggccaagggacagccgagggaaccgcaagtgtacactctgccaccatcccgggaagagatgaccaagaaccaggtcagtctgacctgcctggtgaaggggttttacccgagcgacatcgcagtcgaatgggagtccaacggacagccggagaacaattacaagactaccccgccggtgctggatagcgatggatcgtttttcctttacagcaagttgacggtggataagtccaggtggcagcaaggcaatgtgtttagctgttcagtgatgcacgaggctctgcataaccattacactcaaaaatcacttagcctcagcccaggaaag

SEQ ID NO: 15490 - DNA, 1467 bp, synthetic construct
  misc_feature 1..1467: note = source = /note="Description of Artificial Sequence: Synthetic coding sequence"
  source 1..1467: mol_type = other DNA
atggcgcccgtagcagtctgggcagcactggcggtgggactggaactttgggcagcagcacacgcgctcccagctcaagttgcttttacaccatacgcacccgagccgggatccacatgtaggctgcgggaatactacgatcagactgcccagatgtgctgctctaagtgcagcccaggtcaacacgcaaaggttttctgcaccaaaaccagtgacaccgtctgtgattcttgtgaggatagcacctatactcagctgtggaactgggtcccagagtgcctgtcatgcggatctaggtgttcgagcgaccaggttgagacgcaggcatgtacgcgcgagcaaaatcggatatgtacgtgtcgcccaggctggtactgcgcacttagcaagcaagaaggttgtcggctttgcgcccccctcagaaagtgtcggccaggcttcggcgtggcccgcccaggcacagagactagcgacgttgtctgcaagccctgcgctccaggcactttttctaatacaacgtccagcaccgatatttgccggcctcaccagatctgcaacgtcgtcgcaattccaggcaatgcaagcatggatgccgtgtgcaccagcaccagtcccacaaggagcatggccccaggtgccgttcacctgccacaaccggtctctacaaggtcccagcacacacagcctactcccgagccttccactgccccgagcacctcattcttgcttcctatgggaccttcaccccctgcggaaggcagtaccggtgacgagcctaaatcctgcgacaagacccacacttgccccccctgtcccgcccctgagttgctgggcggaccttcagtctttctgttcccccccaaaccgaaagacactctgatgatttccagaacccctgaggtaacatgcgtagtggtagatgtgtcacacgaagacccggaagttaaattcaattggtatgttgatggagtggaggttcataatgcaaagacaaagcctagagaagagcagtataattccacttatcgggtggtgtccgtcctcactgtgctgcaccaggactggctaaacggcaaagagtataagtgcaaagtttctaacaaggcgctcccagcacccattgagaagacaatctccaaagccaaaggtcagcctagagagccccaggtgtacaccttgcctccttcacgtgaggagatgacgaagaaccaggtgagtctgacatgcttagtcaagggcttttatccctctgacatagccgtggaatgggagagcaacggacagcctgaaaacaactacaagacaacaccccctgtattagacagcgatggttccttcttcctgtatagcaagctcaccgtggacaagtcgcggtggcaacagggtaatgtgttttcttgtagcgtcatgcatgaggccctgcacaatcattacacgcagaagtccctcagcctttcaccgggcaaa

SEQ ID NO: 15491 - DNA, 1467 bp, synthetic construct
  misc_feature 1..1467: note = source = /note="Description of Artificial Sequence: Synthetic coding sequence"
  source 1..1467: mol_type = other DNA
atggcccccgtcgcagtgtgggctgctcttgcagtcgggctcgaactttgggcggcggcccatgctctaccagctcaggtggcttttactccatacgctcctgaacccggtagcacatgcaggctgcgggagtattacgaccagaccgcccaaatgtgttgctctaagtgctccccaggtcagcatgctaaagttttctgcaccaaaaccagtgacacggtgtgcgactcctgtgaagacagcacctacacccagttatggaattgggtgcctgaatgtctgtcatgcggttctcgctgtagctcagaccaggtcgaaacgcaagcatgtacccgggagcagaatagaatttgtacttgtaggccaggttggtactgcgctctgtccaaacaggaggggtgtcgcttgtgcgcccccttacgcaagtgtaggccaggatttggtgtcgcgcggccaggaactgagacaagcgatgttgtctgcaagccttgcgcccctggcacattctccaatacaaccagctccaccgatatttgccggccgcaccagatctgtaacgttgtggccattcccgggaatgcttctatggacgcagtgtgcaccagcaccagtcccactcggtcgatggcgcctggtgctgtgcacctaccccagccagtatctacaagatcgcagcacactcaacccacacctgagccttccaccgcaccatctacgtccttcctactacctatgggacccagcccccccgctgagggctcaactggcgacgagcccaaatcctgcgataagactcacacttgccctccatgcccagcgcccgaactattgggaggcccaagcgttttcctgtttcctccaaaaccaaaagacactctgatgatatcccggacccccgaagtgacgtgtgtcgtggtggacgttagtcacgaggaccctgaggttaaatttaattggtacgtagatggagtggaggtgcataacgccaagaccaaacctcgcgaagagcagtataatagcacctaccgagtggtgagcgtgctgactgttctgcatcaggattggctgaatggaaaggagtataaatgtaaggtcagtaataaagctctcccagcgcccattgaaaagaccatcagcaaggctaaagggcagccccgggagccgcaggtctataccctgccaccctcacgcgaagagatgacgaaaaatcaggtgtcactgacctgcctggttaagggcttctaccccagtgatatagccgtggagtgggagagtaatgggcagcctgaaaataattataagactactcccccagtgctcgattccgatgggtccttcttcttgtacagcaaactaaccgtggataaatcgcggtggcagcaggggaacgtattcagctgctctgtgatgcatgaggccctccacaaccactacacccaaaaatccctcagcctgtcccctggaaaa

SEQ ID NO: 15492 - DNA, 1467 bp, synthetic construct
  misc_feature 1..1467: note = source = /note="Description of Artificial Sequence: Synthetic coding sequence"
  source 1..1467: mol_type = other DNA
atggcgcctgttgccgtttgggcagccctggcagtgggtctggaactgtgggcggcagcgcacgctcttccggcgcaagttgcatttaccccgtacgcaccggaaccaggaagcacctgtcgcctgcgcgagtactacgatcagaccgcccagatgtgctgctccaagtgcagcccaggtcaacatgcaaaagtgttctgtaccaaaacgtctgacactgtctgcgattcctgcgaagatagcacgtatacgcaattgtggaactgggttcctgagtgcctaagctgcggtagcagatgttcgtccgaccaagtggagacccaggcttgcacacgggagcagaacagaatttgtacctgccgccctggctggtattgcgcgctgtctaaacaagaaggctgtagactgtgcgccccgttgcggaaatgtcgtcctgggtttggcgtggcacgcccggggacggagacttcggacgtcgtctgcaagccatgcgcaccgggcaccttctccaacaccaccagctccacagatatctgtcgcccgcaccagatctgcaacgtggtggcaatacctggtaacgcgagtatggatgcggtgtgtaccagcacgtcgcctactaggtccatggcacccggtgccgtccacttgcctcagcctgtgagtactcgatctcagcatacccagccaaccccggaacccagcaccgcccctagtacgagctttctgctgccaatgggtccatcccctcctgcggaaggctccaccggagacgagcccaagtcatgcgacaagacgcacacttgtccaccttgtccggctcctgagctgctgggcggtccatccgtatttctgttcccaccgaagcccaaagacacgctgatgattagccgaactccggaagttacgtgtgtggtcgttgacgttagccacgaggaccctgaagtgaagttcaactggtatgttgacggcgttgaagtccataacgcaaagactaagccaagagaggaacaatataactcaacttatcgtgtggtgagcgtcctgactgtgttgcaccaggactggctgaatggcaaagaatacaaatgtaaagtaagcaataaggcgctgccggcaccaattgagaaaacaattagtaaggctaaaggtcaacctcgagaaccgcaggtttacactttgccgccgtcccgtgaagaaatgaccaagaatcaggtgagcctgacctgcctggttaagggtttctacccatctgatattgccgtggagtgggaaagcaatggccaaccagagaacaattacaagaccaccccgcctgtgctggattcagatggatcatttttcttgtacagcaagctgaccgtggacaaaagccgctggcagcagggcaacgtgtttagctgctcagtgatgcatgaggccctgcacaatcattatacccaaaagtctctgtccctgagcccagggaaa

SEQ ID NO: 15493 - DNA, 1467 bp, synthetic construct
  misc_feature 1..1467: note = source = /note="Description of Artificial Sequence: Synthetic coding sequence"
  source 1..1467: mol_type = other DNA
atggcaccggtggccgtttgggccgcattggctgttggactggaactttgggccgccgcgcacgcgctgccagctcaggtcgcattcaccccgtatgcacccgaacctggttcgacctgcagactccgggagtactacgatcagaccgcccaaatgtgttgttcaaaatgtagcccaggccagcatgccaaggtcttttgcaccaaaacttcggacaccgtctgcgacagctgcgaggatagtacttacacccagttgtggaattgggtgcctgaatgcctgtcgtgtgggtcacgctgttctagcgaccaagtcgagactcaggcgtgcactagagaacaaaacagaatctgtacgtgtaggcccgggtggtactgcgcgctgtcaaagcaggagggttgccgcctgtgcgccccactgcggaagtgccgccccgggttcggagtggcacgcccgggaaccgaaacttccgatgttgtgtgtaagccgtgcgccccaggcaccttttctaacaccacttcaagcactgatatttgccgcccgcatcagatatgcaacgtggtcgcaatcccagggaatgcctcgatggacgccgtgtgtacgtcgacttctcccacccggtcaatggcgccaggtgccgtgcacctcccgcaaccagtttcgactcggtcacaacacacccagcctactccagagccttccaccgcgccttcgacgtcctttcttctcccgatgggaccgtccccgcccgcagaaggctcgactggagacgaaccgaaatcgtgcgataagactcacacctgcccgccttgcccagcaccggaactcttgggaggaccgtcagtgttcctcttcccgccgaagccaaaggacaccctcatgatctcgcggactccagaagtaacctgcgtcgtagtggatgtgtcgcatgaggacccggaggtgaagttcaattggtacgtggacggcgtggaggtgcataatgctaagaccaagccacgcgaggaacaatacaacagcacctaccgggtcgtgtccgtgctgactgtgctgcatcaagattggctcaatggaaaggaatacaagtgcaaggtgagcaacaaggctcttccagcacccatcgaaaaaactatctcgaaggcgaaaggtcagccgcgagagccgcaggtgtacacgcttccgccgagtcgcgaggagatgactaagaaccaggtgtccctgacctgcctggtgaagggattctacccgagcgacatcgccgtggaatgggaatccaacggacaacccgagaacaattacaagactactccacccgtcctggacagtgacggctcctttttcctgtattcgaaactgaccgtggataaaagcaggtggcagcaggggaacgtattcagctgctcagtcatgcacgaagccctccacaaccactacacccagaaatcactgtcgttgagcccgggtaag

SEQ ID NO: 15494 - DNA, 1467 bp, synthetic construct
  misc_feature 1..1467: note = source = /note="Description of Artificial Sequence: Synthetic coding sequence"
  source 1..1467: mol_type = other DNA
atggctcccgtcgcagtatgggcagctttagccgtcggactcgaactgtgggccgcggctcacgctcttcccgcacaggtcgcatttactccatatgcccccgaacccggaagtacttgtcgactacgggaatactatgatcagactgctcagatgtgctgttctaaatgctcacctggacagcatgcaaaagtgttctgtactaaaacttccgatacagtgtgtgactcatgtgaggactcaacatacacacagttatggaattgggtgcccgagtgcctttcatgcggatccaggtgctcatccgatcaggtggaaacgcaggcatgtacacgcgaacagaacagaatctgcacttgtcggcccgggtggtattgtgccctgtctaaacaagaaggatgccgactgtgcgcaccactccgaaaatgccgacccgggttcggggtagcaagacccggaacagaaacatctgacgtggtgtgtaaaccctgtgcccctgggacattctcaaacactacgtcttctactgatatatgcagaccccatcagatctgtaacgtcgtagccatccccgggaacgcttcaatggacgccgtgtgtacatcaacatcacccactcgctcaatggcccctggggctgtgcatctcccccagcctgtctctactagatctcagcacacacagccaactccagaaccctccacagccccatccactagtttccttttacccatggggccatccccacctgctgaagggtcaactggagacgaaccaaaatcatgtgataaaactcatacatgccccccctgccctgcccctgaactcctaggaggaccttctgttttcctgtttcctccaaaacccaaagatactttaatgatatcacgtactcccgaagtgacatgtgtggtggtagatgtgtcccatgaagatcctgaggtgaaatttaactggtatgtggatggggtggaagtgcataatgcaaagactaaacctcgcgaagaacagtacaattctacatacagagtcgtttcagttctaacagtcctgcaccaggattggctcaatgggaaagaatacaaatgtaaagtgagtaataaagccctccccgccccaattgaaaaaacaatatccaaggctaaaggacagcccagagagccccaggtctatacactgcctccttcccgggaagaaatgacaaaaaatcaggtctctcttacatgccttgtaaaaggattctacccctctgatatagctgtggaatgggaatctaacgggcagcctgaaaataactataaaactactccccccgtgctggattcagatggaagtttcttcctttactccaaactgacagtcgataaaagtcggtggcagcagggaaacgtcttttcctgctctgtcatgcacgaagcactccataatcactatactcagaagtcgctctcactttcccccggaaag

SEQ ID NO: 15495 - DNA, 1467 bp, synthetic construct
  misc_feature 1..1467: note = source = /note="Description of Artificial Sequence: Synthetic coding sequence"
  source 1..1467: mol_type = other DNA
atggctccggtcgcggtgtgggctgcactggctgtggggctggaactgtgggccgctgcacatgcgttgccggctcaggtggccttcactccatacgcgcctgagcccggcagcacctgtcggctgcgagagtactacgaccaaactgcgcagatgtgctgttctaaatgctccccgggacaacacgctaaagtcttttgcactaagacctcagatactgtgtgcgacagctgcgaagattcgacttacacccagctctggaattgggtccctgagtgtctttcgtgcgggtcacgctgttccagcgaccaggtggagactcaagcctgtacgagagaacagaacaggatctgtacgtgcagaccggggtggtactgcgcgctctccaagcaagaaggatgccgcctttgcgcaccgctgcgcaagtgccgcccgggattcggagtggcccgcccaggtactgagacttccgacgttgtgtgtaaaccgtgcgcgcctggaaccttttcaaataccacgtcctcgaccgacatatgcaggccacatcagatctgcaacgtcgttgcgatcccgggtaatgcctcgatggacgcagtgtgtacgtcgacctcaccaaccagatctatggccccgggggcagtgcaccttccccagccagtgagcacccggtcccagcatacccagcctaccccggaaccttcgactgcgccctcgactagcttccttctgcctatgggaccatcacctccggcggaagggtccactggagatgaacctaagtcgtgcgataagacccatacctgccccccatgccctgccccggagctcctcggcggcccgtcggttttcctcttccctcctaaacctaaggacaccctgatgatttcgcgcaccccagaagtcacctgcgtggtggtggatgtgtcgcacgaggatccagaagtgaagtttaactggtatgtggacggggtcgaagtccacaatgccaagactaagccgagagaggaacagtacaactccacctaccgggtcgtgagcgtgctcactgtgctccaccaagactggctcaatggcaaagagtacaaatgcaaagtctccaacaaggctctgcctgccccgatcgaaaaaaccatctctaaggcgaagggacaaccacgggaacctcaggtctacaccctgcccccatcccgcgaagaaatgacgaagaaccaagtttcgctgacttgtcttgttaagggcttctacccctctgacattgccgtcgagtgggagtccaatgggcagccagagaacaactacaagaccactccgccagtgctggacagcgacggatcctttttcctgtattcaaagctgactgtggataaatcgcggtggcagcaaggaaacgtgttctcatgctccgtgatgcacgaggctctccacaaccactacacccaaaagagcctttccttgtcgccaggtaag

SEQ ID NO: 15496 - DNA, 1467 bp, synthetic construct
  misc_feature 1..1467: note = source = /note="Description of Artificial Sequence: Synthetic coding sequence"
  source 1..1467: mol_type = other DNA
atggcccctgtggcagtctgggccgctttggctgtgggtctggagctttgggcagccgcccacgcgctgcccgcgcaagttgcattcaccccttacgcacccgaacctgggtcaacttgcagacttcgtgagtactacgatcaaactgcacaaatgtgttgctctaagtgttcaccaggccagcacgctaaagtgttttgtaccaagaccagcgatactgtatgtgattcttgcgaggattccacttacacccagctgtggaactgggttccagagtgtctttcatgcggatccagatgcagctcggatcaggtcgaaacccaagcatgcactagagagcagaacagaatttgtacctgcaggccaggatggtactgtgccctgtcaaaacaagaaggctgccggctttgtgcccctctgcggaaatgtcgacctggattcggcgtggctaggcctgggaccgaaactagcgatgtcgtgtgtaagccatgtgccccgggaactttttcgaatactacttcaagcactgatatctgtcggcctcatcaaatctgtaatgtggtggcaataccaggtaacgcatctatggatgcagtatgtacctctacgtccccaactagatccatggcccccggtgcggtgcatcttccacaacccgtctccactagatcccagcatactcagcctacccctgaaccttcaaccgcaccaagtacttcgtttctcctgccgatgggacctagcccaccggcagaaggaagcaccggtgacgaacccaagagctgcgacaagacgcacacttgtccaccttgccccgccccagagctgcttggtgggccaagcgttttcttgttcccacctaagccaaaggacaccttgatgattagccgtactcccgaagttacctgtgtggtggtcgacgtgagtcacgaggatcccgaagtgaagttcaattggtacgtcgacggagtcgaggtccacaacgctaaaactaagccaagggaggaacaatacaattcgacctaccgcgtcgtgtcagtgctcactgtgcttcatcaggattggctgaacggtaaggagtacaagtgcaaagtttccaacaaggcactccctgcacccattgaaaaaactataagcaaggccaagggacagccacgggagcctcaagtgtataccctcccaccaagccgcgaagaaatgaccaagaatcaagtgtcactgacctgccttgtgaagggcttctacccctcggacattgcagtggaatgggaatctaacggccagcctgaaaacaactacaagaccacccctcccgtcctggactccgatggaagttttttcctgtattccaaacttacggtggacaaatccaggtggcaacagggcaatgtgtttagctgttcggtgatgcatgaagcactgcataaccattacactcaaaagtcgctgtcactctcccccgggaag

SEQ ID NO: 15497 - DNA, 1467 bp, synthetic construct
  misc_feature 1..1467: note = source = /note="Description of Artificial Sequence: Synthetic coding sequence"
  source 1..1467: mol_type = other DNA
atggcaccggtggcagtgtgggcagcgctggcagtcggactggaactgtgggctgcagcgcatgccctgccagctcaggttgcattcactccttacgccccagagcctggatcaacttgccggctgagggagtactacgatcaaaccgcgcagatgtgttgtagcaagtgttcacccggacagcatgcaaaggtcttttgtactaagacttccgatactgtgtgcgactcctgtgaagattccacctacactcaactctggaattgggtgcccgaatgcctctcctgtggatcgcgctgttcttctgatcaggtggaaacccaggcctgtactcgggaacaaaacagaatatgcacttgtagacctggatggtattgcgccctttcgaaacaagaaggctgtcgactgtgtgcaccgcttagaaaatgtcgcccaggcttcggagttgcgcggccgggaactgaaaccagcgatgtggtctgtaagccatgtgctcctggaactttttcgaataccacctcgtcaaccgacatttgcagacctcatcaaatctgcaacgtggtggcaattccaggaaacgcgagcatggatgcagtgtgtacctcgacttcgcccactcggtcaatggcacctggcgctgtccaccttcctcagcctgtctcgaccaggtcccagcacacccagcctacccctgaaccctcgactgcgccctcgacttccttcctgcttcctatgggaccttcgccacctgccgaaggatctacgggagacgaacctaagtcctgcgataagacccacacttgtccaccttgtcctgccccagaactccttggagggccaagcgtctttctttttcctcccaaaccaaaagatactctcatgatctcaaggacccccgaagtgacgtgtgtggtggtggatgtttcccatgaggatcctgaagtgaagttcaattggtatgttgatggagtggaggtgcataacgcaaagactaaaccacgcgaagaacaatacaatagcacgtaccgtgtggtttcggtgcttaccgtgcttcatcaagactggctgaacggcaaggagtacaagtgcaaggtgagcaacaaggccctgcccgcccctattgaaaagaccatcagtaaagcaaaaggacaaccccgagaacctcaagtctacactctgccgccatcccgggaggaaatgactaagaatcaagtctcccttacttgcctcgtcaaaggattctacccttccgacattgccgtggaatgggagagcaatggtcagccagagaacaattacaaaactactccaccagtgcttgacagtgatggcagcttctttctttacagcaagctgaccgttgacaagtccagatggcagcagggaaatgtgttttcgtgtagcgtgatgcacgaggcgctgcacaatcattacacgcagaaatcgctctccttgtcacccggcaaa

SEQ ID NO: 15498 - DNA, 1467 bp, synthetic construct
  misc_feature 1..1467: note = source = /note="Description of Artificial Sequence: Synthetic coding sequence"
  source 1..1467: mol_type = other DNA
atggcaccagtcgcagtctgggccgcactggccgtcggattggagctctgggctgcggcgcatgcacttcctgcccaagtggcttttacgccctacgcaccagagccaggttccacctgtagactgcgggaatactacgaccagactgcgcaaatgtgttgtagcaagtgttcacctggacagcacgcaaaggtgttttgtactaagacttccgataccgtctgtgattcgtgtgaagattccacctacactcaactttggaactgggtgcctgaatgtctgtcgtgtggctcgcgatgtagttcagatcaggtggaaactcaggcctgcacccgcgaacagaatcgtatttgtacttgcagaccaggttggtactgtgccctcagcaagcaagaaggatgtaggctttgtgcacctctgagaaagtgtaggcctgggtttggcgtggcaagaccggggaccgaaacctcggacgttgtgtgtaaaccatgtgcacccggcacgttctcgaataccaccagctcgaccgatatttgtagaccgcaccaaatttgtaatgtggtggctatcccaggtaatgcctccatggacgcagtctgcacttcgacctcgccgacccgctccatggcgcctggcgcagtccatctgccacaaccagtctcgacccgatcacaacatacgcagccgactcctgaaccttccaccgccccatccacctcttttctcctgccaatgggaccctcccctcctgccgaagggtccacgggcgatgagccaaagtcgtgtgataaaacccacacctgtcctccgtgccccgccccagaacttctgggaggtccaagcgtgtttctgttcccaccaaaaccaaaagatacccttatgatttctcggacccctgaagtgacttgcgtggtcgtcgatgtgtcgcatgaagatcctgaggtcaaattcaactggtacgtcgatggagtcgaagtgcataatgcaaaaaccaaaccacgcgaagaacaatacaacagcacttatcgggtggtgagcgtgctgactgtcctccaccaagactggctcaacggtaaggaatacaagtgtaaagtttcgaacaaggcccttccagcccccatcgaaaagaccatcagcaaagccaaaggccagccaagagaaccacaggtctacacccttccacctagccgcgaagaaatgacgaaaaatcaagtgtccctgacctgcctcgtgaaggggttctacccgtcggacatcgcagtggagtgggagtccaacggtcaaccggaaaacaactacaagactaccccaccggtgctggacagcgacgggtcgtttttcttgtactcaaaacttaccgtggacaagtcgcgatggcagcaaggaaacgtcttttcatgttcagtgatgcatgaagcccttcacaatcactacacccagaagtcactttccctttctcccgggaag

SEQ ID NO: 15499 - DNA, 1467 bp, synthetic construct
  misc_feature 1..1467: note = source = /note="Description of Artificial Sequence: Synthetic coding sequence"
  source 1..1467: mol_type = other DNA
atggccccagtggcagtgtgggcagctcttgcagtggggctggaactttgggccgccgcacacgcactgccagctcaagtggcgtttaccccttacgcacctgaacccggtagcacttgtagactccgagaatactacgatcagaccgcgcaaatgtgctgttcaaagtgctcgcccggccaacacgcaaaggtgttttgtactaagacgtcggataccgtctgtgattcgtgcgaagattccacctacactcaactttggaactgggtgccagagtgcttgagctgtggttcccgctgttcctcggatcaggtggaaacccaagcgtgtacccgtgagcaaaatcggatctgtacttgcagaccgggatggtactgtgcgctcagcaagcaagaaggatgtcgactctgcgctccacttcggaagtgcagacctggatttggtgtcgcacgacctggaacggaaacctctgacgtagtatgcaaaccttgtgccccgggcaccttctcgaacactactagttcaactgatatatgtaggccacatcaaatttgtaatgttgtcgcaatcccaggaaacgcttccatggatgcggtgtgtacttcgacttcgcctacccggtcgatggcgccaggcgcggtccacctgcctcagcctgtttccactcggagtcaacatacccagcctactccagagccatcaaccgcaccctccacgagctttcttctcccaatgggtccgagccctcccgccgagggctcgaccggtgatgaacccaaaagctgtgataagactcatacctgtcccccttgtcctgcacccgaactgttgggcggaccttcagtgtttctcttcccgccgaagcctaaagatactcttatgattagtcggactcctgaagtgacttgtgtggtggtggacgtgtcccatgaggacccagaagtgaagttcaattggtacgtggacggagtggaggtccataacgcaaaaaccaaacctagggaagaacagtacaactcgacgtaccgggtggtgagcgtgcttactgtgctgcaccaggattggctcaatggaaaagagtataagtgcaaggtgagcaataaggccctgccagcgcctattgagaaaaccattagcaaggcgaaaggacagcctagggaacctcaggtgtataccctgcccccctcacgcgaagaaatgactaagaaccaagtctcccttacttgccttgtgaagggattttacccgtcagatattgccgtcgaatgggaatcgaatgggcagccagagaacaactacaagacgactccgcctgttcttgactccgatggatcgttttttctttactccaagctgactgtcgacaaaagcaggtggcagcagggaaacgtcttttcgtgcagcgtcatgcatgaggcgctgcacaaccattacacccagaaatcgctcagcctttccccaggaaag

SEQ ID NO: 15500 - DNA, 1467 bp, synthetic construct
  misc_feature 1..1467: note = source = /note="Description of Artificial Sequence: Synthetic coding sequence"
  source 1..1467: mol_type = other DNA
atggcgcctgtcgccgtgtgggcggccctggccgtggggctggagctgtgggcagccgcacacgcattacctgcccaggtcgccttcacaccttacgctccagaacctggctcgacttgtcgcctcagggagtactacgatcaaactgcccagatgtgttgctccaagtgttctccgggccagcatgcaaaagtgttttgcacaaaaacatccgatactgtttgtgattcttgcgaagattctacctacacccaactgtggaactgggtcccagaatgtttgtcctgtggaagccgctgctcctcagaccaggtcgagacacaggcctgcacccgggagcaaaatagaatttgcacgtgtagacctggatggtattgcgccctttcaaaacaggagggctgtcgtttgtgcgcacccctcaggaagtgtagaccgggttttggtgtggcccggccaggaactgagacttccgatgttgtctgcaaaccatgtgctccagggacattttccaatacaacatcctccactgatatctgccgaccacaccagatttgcaacgtcgtggctatcccagggaacgcttcaatggatgctgtatgtacgtcgacatctcccactcgctccatggcccccggcgcagtgcatctgcctcagcctgtgagtacccggagccaacatactcagcccactcctgagccctcaaccgcgccatctacctcatttttgctgcccatgggcccctcaccacccgccgaaggaagtacgggcgacgagcccaaaagttgcgataagacacacacctgccctccttgcccggcccccgaattattggggggaccctcagttttcctattcccccccaagccaaaagatacactgatgatatcccgcactccggaagtgacttgtgttgttgttgatgttagccatgaggatcctgaggttaagttcaattggtatgtagatggagtcgaggtccataacgccaagaccaaaccacgggaggagcagtacaattccacctacagagtcgtgtctgtcctcactgtgctgcaccaggattggctgaatggtaaggagtataaatgcaaagtctctaataaagcccttcctgctcccatagaaaaaacgataagcaaggccaaagggcaaccccgtgagccacaggtgtacacactgcctccgagcagggaggagatgactaagaaccaggtgagtctgacctgtctggtgaagggcttctacccctccgacatagcggtggaatgggagagcaatgggcagccagagaacaactataagacgactcccccagtgctggactctgatggatccttttttttgtattccaaactcacggtagataagtcgaggtggcagcagggcaatgtgttcagctgcagcgtgatgcacgaggcgctccacaaccattatacgcaaaagtctctgtccctcagccctgggaaa

SEQ ID NO: 15501 - DNA, 1467 bp, synthetic construct
  misc_feature 1..1467: note = source = /note="Description of Artificial Sequence: Synthetic coding sequence"
  source 1..1467: mol_type = other DNA
atggctccagtggccgtgtgggctgcactggctgttgggctcgaactgtgggcggcagctcatgctctgccagctcaagtcgcgtttaccccatatgctccggaaccagggtccacatgtaggctacgggagtattacgatcagacagcccagatgtgctgctccaagtgcagcccaggacaacatgccaaggtgttctgtacgaaaacatccgataccgtttgcgattcctgtgaggattctacctacacccagctgtggaattgggtaccagagtgtctttcttgcggcagcaggtgctcttcagatcaggtggaaacgcaggcgtgcacacgcgagcagaatcggatatgcacctgtagacctggatggtactgtgccctaagcaagcaagaagggtgcagactgtgcgcacccctacggaagtgcaggcctgggttcggagtggccagaccgggaacagagaccagcgatgtggtgtgtaagccctgtgcccctgggacattcagcaatacaaccagctcaactgacatatgccggccacatcagatctgtaatgtggtggcaatccctgggaatgcctccatggacgcagtgtgtacgtctactagccctactagaagcatggctcccggggccgtgcatttgcctcaacccgtgagtacacggtcccaacacacccagcccactcccgaaccaagtaccgctccatctacctctttcttactgcccatgggtccctctcccccagctgaaggctccaccggcgacgaaccgaagtcctgtgataaaacccatacctgccctccatgcccagcacccgagctgttgggaggtcccagcgttttccttttccctccaaaacctaaagacacattgatgataagtcggacacccgaggtgacctgcgtggtcgtcgatgtgagtcacgaggaccccgaggtgaagtttaattggtacgttgacggagtcgaagtccataatgctaaaaccaagccacgggaagagcaatataactctacctatagagtggtcagcgtactaacagtgctccaccaggactggctgaacggtaaggagtataagtgcaaagtatcaaataaggcactacccgcccctattgagaagaccatctcaaaagccaaaggccagccaagggagccccaggtttatactctccctccttctagggaggagatgacaaagaaccaggtgtccctgacatgcctcgtgaaggggttttatccttcggacattgccgtggagtgggaatcgaatgggcagcccgaaaacaattataaaacgaccccacccgtgctggatagtgacggaagcttctttctgtattccaaacttactgtggataagtccaggtggcaacaagggaacgttttcagctgcagtgtcatgcatgaagcccttcataatcattacacccagaagagtctgtcgctgagtcccggaaaa

SEQ ID NO: 15502 - DNA, 1467 bp, synthetic construct
  misc_feature 1..1467: note = source = /note="Description of Artificial Sequence: Synthetic coding sequence"
  source 1..1467: mol_type = other DNA
atggcacccgtagccgtctgggccgccttggctgtcggacttgaactttgggccgctgcgcacgctctgcccgcccaggtggcgttcacaccttacgcccctgagcccggctctacctgtcgcctgcgagaatactacgaccaaacagctcagatgtgctgctcaaaatgcagccctgggcagcacgcgaaagtcttctgcacaaaaacatctgatactgtgtgtgactcctgcgaggactctacatatacccagctctggaactgggtccctgagtgtttgagctgcggctctaggtgcagctccgaccaggtggaaacccaggcctgcacgagggagcagaataggatttgtacctgtcggcccggatggtattgcgccctatcaaaacaggaggggtgtaggctgtgcgcaccgctccgtaagtgtcgacctggattcggagttgctaggccaggcaccgagacctcagacgtagtgtgcaaaccttgtgcccccggcacgttttctaacacgaccagcagcaccgacatttgccggcctcatcaaatctgtaatgttgtcgccatcccgggcaacgctagcatggatgccgtctgcacaagtacctccccaacacgatcaatggcccccggcgccgtgcaccttccccagcctgttagtactcgaagccaacacacacagccaacgccagagccatctacagctcccagtactagcttcctgttgcctatgggaccctctccacctgccgagggaagcactggcgatgaaccaaagtcttgtgataaaacccacacttgcccaccttgccccgctcctgaactcctaggcggacccagtgtgttcttgttcccccccaaaccaaaagatacactgatgattagccgaacgccggaagtgacctgcgtggtggtggacgttagtcacgaggatcctgaggtgaagtttaattggtatgtagatggcgttgaagtgcacaatgctaaaactaagcctagagaggaacagtataattccacctatcgggtcgtgagtgtcctgaccgtcctgcaccaagactggttaaacggaaaggaatataaatgcaaagtgtccaacaaggccttacctgcccccatcgaaaagacaattagtaaagctaagggacagccgcgagagccacaggtgtacacattacccccctctcgagaagaaatgactaagaatcaggtatctctgacatgcttagtcaaaggcttctacccttccgacatcgccgtggagtgggaatctaatggccagcccgagaacaactataagaccactccgcccgttcttgatagcgacggtagcttcttcctgtattctaagctaacggtggacaagtcaaggtggcagcaggggaacgtgtttagctgtagcgtgatgcatgaggccctgcacaatcattatacccaaaaatcactgtctcttagccccgggaaa

SEQ ID NO: 15503 - DNA, 1467 bp, synthetic construct
  misc_feature 1..1467: note = source = /note="Description of Artificial Sequence: Synthetic coding sequence"
  source 1..1467: mol_type = other DNA
atggctccagttgctgtttgggccgccctggctgtggggttggagctctgggctgctgcccacgccttgcctgcacaagtcgcatttactccgtacgctcctgaaccaggatccacctgcagacttagagaatattacgaccagactgcacagatgtgctgcagcaaatgcagtccaggacagcatgctaaagtcttctgcaccaagacttcagatacagtctgtgacagctgcgaagactcaacctatacacaactgtggaattgggtaccagagtgcctgtcttgtggttctaggtgcagctctgatcaggtcgaaacccaagcttgcacaagagagcagaaccggatatgcacctgccggcctggatggtactgcgctctgtctaaacaagagggctgtaggctttgtgcacctcttagaaagtgcaggcccgggtttggagtggcaagaccaggcaccgagacatccgacgtagtatgcaagccttgcgccccagggactttctctaacactacgtcatcaaccgatatctgtagaccacatcaaatttgcaacgtcgtcgctatccctggcaacgccagcatggacgctgtgtgcacatcaacgtcccctactcgatctatggctccaggcgctgtccatctaccacaacctgtctccacccggtctcagcatacacaaccaaccccagaaccaagcactgcaccttcaacaagttttttgttgcctatgggcccgagccccccagccgaaggctctacaggtgatgagcccaagagctgcgacaaaacccacacctgccccccctgtccagcccccgaactgctcggcggcccttctgtcttcctgttcccccctaaacccaaagacacactcatgatctcacgtacacccgaggtgacttgtgtcgtggtggacgtgagccacgaagaccccgaggttaaattcaactggtacgtagacggagtggaggttcacaacgcaaagacaaaaccacgcgaggagcaatacaatagcacatatagagtcgtcagcgtgttgacagtgctccaccaagactggctgaacggtaaggagtacaagtgcaaagtctctaacaaggccctgcccgcacccatcgagaaaaccataagtaaggccaaagggcagcctagagaaccccaagtttacactttacccccctcacgagaagaaatgactaaaaaccaggtttcattgacttgcctcgtgaaaggattctatcccagtgatatcgccgtggaatgggagagcaatggtcaacccgagaataactacaagaccacacctccagtcttggacagcgatgggagttttttcctttattctaagctcacagtggacaaatccagatggcaacagggcaacgtgttctcatgcagcgtgatgcacgaggccctgcataaccactacactcagaaatctctgagcctgagtcccggcaag

SEQ ID NO: 15504 - DNA, 1467 bp, synthetic construct
  misc_feature 1..1467: note = source = /note="Description of Artificial Sequence: Synthetic coding sequence"
  source 1..1467: mol_type = other DNA
atggcacctgtcgcggtgtgggccgcacttgcagtcggacttgagctttgggcggcagcacatgcacttcctgcgcaagtcgcttttactccttacgcgcctgaaccagggtccacttgtcggctgagggagtactacgaccagacggcccaaatgtgctgttccaagtgttcccctggccagcatgcaaaagtgttctgcaccaagacctccgataccgtgtgcgactcgtgcgaagattcgacttacacgcagttgtggaattgggtgccagaatgcctctcttgtggaagccgctgctcaagcgaccaggtcgaaactcaggcatgtactcgtgaacaaaacagaatttgtacttgtcggccgggttggtactgcgcactttccaaacaggagggttgtcgactctgtgctcctcttcggaagtgtagacccggttttggagtggcaagacctgggactgaaaccagcgatgtggtctgtaagccttgtgcacctggaacgttctcaaacaccacttcgtcgaccgatatctgccgaccacaccaaatttgcaacgtggtggcaatcccaggaaatgcaagcatggatgccgtgtgtacttcgacgtcaccgactagatcgatggcgcccggagccgtccatctgcctcagccggtgtcaactcggtcacaacatacccagcccactcctgaaccttcgactgcaccctcaacgtcattcctgctgcctatggggccatcaccccctgccgaaggctccaccggcgatgaacccaagtcctgcgacaagacgcatacttgccccccatgtcccgcacctgaactccttgggggtccctcagttttcctgtttccacccaagcctaaagataccctgatgatttcgaggacgcctgaagtgacgtgtgtcgtggtcgatgtgtcccacgaagatcccgaagtgaagttcaactggtatgtggatggagtggaggtccacaatgctaagaccaagcctagagaagaacagtacaactctacctatcgcgtggtgtccgtgctcacggtgttgcaccaggattggcttaacggcaaggaatacaagtgtaaagtctccaacaaggcactgccagcaccaatcgagaaaaccatttccaaggcaaagggccagcctagagaaccacaagtgtacactctgccgccttcacgcgaggagatgacgaaaaaccaagtgagcctgacctgtctggtcaagggcttttaccctagcgatatcgccgtcgaatgggagagcaacggacaaccggagaacaattacaagactactccaccagtgctggactcagatggctcgtttttcctttactccaaactgaccgtggacaaatcccggtggcaacaaggaaatgtgttttcgtgctctgtcatgcatgaggcccttcacaatcattatacgcaaaagtcgctctcgcttagcccgggaaag

SEQ ID NO: 15505 - DNA, 1467 bp, synthetic construct
  misc_feature 1..1467: note = source = /note="Description of Artificial Sequence: Synthetic coding sequence"
  source 1..1467: mol_type = other DNA
atggctccggtggccgtctgggctgctctggccgtgggtctggagttatgggcagctgctcatgcattacccgcccaggtggcttttacgccctacgcccccgaacctggaagtacatgtcggctacgcgaatattacgaccagaccgcccagatgtgctgtagcaaatgttctcctggacagcatgccaaggtgttctgcaccaagacatccgatactgtttgtgacagttgtgaagacagcacctatactcagctgtggaactgggtgcccgagtgtctgagctgtggcagtaggtgttccagtgatcaggtggaaacgcaggcctgtactagggagcagaatagaatttgcacatgtcggcccggttggtactgcgcattgagtaagcaggagggatgtaggttgtgcgctcccctgaggaagtgccggcctggctttggagtggccaggcctggcacagaaacctctgacgttgtctgcaaaccatgcgcccccgggacgttctctaatactacgtcaagcaccgatatctgtcggccacaccaaatatgtaacgtcgttgcaatccctgggaatgcgtctatggatgctgtctgtacatcaacgtctcccacgaggagtatggcacctggggctgttcacctgccccaaccggtgtccacccgatctcagcacacacagccgacccccgaaccaagcaccgctccgtctacctcttttctgctgccaatgggcccctcacccccagccgagggaagtaccggcgacgagcctaagtcttgcgataaaactcatacttgtccaccatgtccagcaccggaactcctggggggcccctcagtcttcttattcccgcccaagccgaaagacactttgatgatatctcggacacccgaagttacctgcgtagtggtggacgtgagccacgaagatccagaagtcaagttcaattggtacgtggatggggtggaagtccacaatgccaagaccaagcccagagaagagcagtataattcaacttaccgggttgtctccgtgttaacagtgttgcaccaggactggctcaatgggaaggagtacaaatgcaaggtgtctaataaggccttacctgctcccatcgagaagacgatttcgaaagcaaaaggtcagcctcgggagccccaggtgtacaccttgccaccatcccgggaagagatgactaagaaccaagtgtcattaacttgtctcgtaaagggtttctacccttctgacattgcggtagaatgggagagcaacggccagccggaaaacaattacaagaccacacctccggttcttgacagcgatggctccttctttctttatagcaagctgactgtggacaagtctcgttggcagcagggaaatgtgttttcttgctcagtgatgcacgaagcgcttcataaccattatacccagaaaagcctctcattgtcccctggaaag

SEQ ID NO: 15506 - DNA, 1467 bp, synthetic construct
  misc_feature 1..1467: note = source = /note="Description of Artificial Sequence: Synthetic coding sequence"
  source 1..1467: mol_type = other DNA
atggcccctgtggctgtgtgggctgccctggcagtggggctcgagttgtgggccgccgcccatgccctgcccgcacaggtcgccttcaccccatacgcacctgaacctggcagtacatgccgactacgcgaatattatgatcagacggcgcagatgtgctgtagcaagtgctcgcccgggcagcacgccaaagttttctgtactaagacatctgatactgtctgtgactcctgtgaggacagtacctacactcagctatggaactgggtccctgaatgtctgagttgtggcagccggtgttcgtcagatcaagttgagacccaagcgtgcactagagagcagaacaggatctgcacttgtaggccggggtggtattgcgcactgagcaagcaagaaggatgccggctttgcgcgccccttcgaaaatgtcggccagggttcggagtggcacgacccggcaccgaaacatctgacgtggtctgtaaaccatgcgcgcccggcacatttagtaataccacaagttccaccgacatttgccggcctcaccaaatctgtaacgtcgttgccatccctggcaatgcctctatggatgcggtctgcacatctaccagcccgaccaggtcgatggctcctggggcagttcacctgccgcagccagtgagcactcgctcccagcatactcagccgacgcccgagccttccaccgccccctctaccagttttctactgcctatgggtccctccccgcccgcagaaggcagcacaggagacgaacctaagagctgcgataaaacccatacatgtcccccatgccctgcgccagaactgcttggcggcccatctgtctttctgttcccacccaagccaaaggacaccttgatgatttcccggactcccgaggtgacatgtgttgtggtcgacgtctctcacgaagatcctgaagtcaaatttaactggtacgtggacggcgttgaagttcacaacgccaagacaaagccaagggaggagcagtataattctacgtacagagtagtaagtgtgcttactgtcctccaccaggattggctgaacggtaaggaatataaatgcaaggtctctaataaagccctgcccgcccctatcgagaaaactatttccaaagccaagggccaaccccgagaaccccaggtctatacactcccacccagccgggaagagatgaccaagaatcaggtctcattgacttgtctggtgaaggggttctatccgagcgatattgctgtggagtgggaatcgaacgggcaacctgaaaacaactataagacaactcctcccgtactggattcagatgggtcattttttctgtactctaagctcacagtcgataagtctaggtggcagcaaggcaatgtattttcatgttccgtgatgcatgaggccctccataaccattatacacaaaagtcactgagtttatcccccggaaaa

SEQ ID NO: 15507 - DNA, 1467 bp, synthetic construct
  misc_feature 1..1467: note = source = /note="Description of Artificial Sequence: Synthetic coding sequence"
  source 1..1467: mol_type = other DNA
atggccccggtcgctgtgtgggcagcgctcgctgtggggctcgagctctgggccgcggctcacgcgctgcctgcccaagtggcattcaccccatatgctccggaacctggcagcacttgccgcctgagagaatactacgaccaaaccgcacagatgtgctgctcgaagtgctcaccaggccagcacgcgaaggtcttttgtaccaagacctcagacaccgtgtgtgattcgtgcgaagattccacgtacactcagctgtggaattgggtgccggagtgcctctcctgtggaagtcgatgctcatcagaccaggttgaaacccaagcctgcaccagagagcaaaaccggatctgcacctgccgccctggatggtactgtgctttgtcgaagcaggagggatgccgcctctgcgccccactgaggaagtgccgtccaggattcggggtggcacgcccaggaaccgagactagcgacgtcgtctgtaagccctgcgccccaggaactttctccaataccacttcctcgacggacatctgccggccacaccagatttgcaacgtggttgctataccgggaaacgccagcatggatgccgtgtgtacctccactagtccgaccagatcgatggcacctggcgcggtccatctgccacagccggtgagtacgagaagccaacatacgcagccgacgcccgagccatcgaccgccccgtcgacttctttcctgcttcctatgggaccaagcccacctgctgaaggttcgactggagacgaacccaaatcatgtgataagacgcacacctgccccccgtgccccgcccctgaactcctgggcggaccgtcagtgtttctgttccccccaaaacctaaggacaccctgatgatcagccggactccggaggtgacttgcgtggtggtggatgtgtcacatgaggatccggaagtgaaattcaactggtacgtcgacggggtcgaagtgcataatgccaagaccaagccccgggaggagcaatacaattcaacctaccgtgtagtgtccgtattgactgtgttgcaccaggattggctcaacggcaaagagtacaagtgcaaagtgagcaataaggccctgccggcgcccatcgaaaaaactatctcgaaggcaaaaggacagcctcgcgaaccccaggtgtatactctgccaccgtcacgcgaagagatgacgaaaaaccaagtcagcctcacttgcctggtcaaggggttctacccttcggacatcgctgtcgaatgggagtcgaacgggcagccggaaaacaactacaagaccactccacccgtgctggactccgacggatcattctttctttacagcaagctcaccgtcgataagtcccggtggcaacagggaaacgtgttctcctgtagtgtgatgcacgaggcacttcacaatcattacacccaaaaatccctgtcgctgagcccgggaaag

SEQ ID NO: 15508 - DNA, 1467 bp, synthetic construct
  misc_feature 1..1467: note = source = /note="Description of Artificial Sequence: Synthetic coding sequence"
  source 1..1467: mol_type = other DNA
atggctcctgtggctgtttgggcggcacttgcagtgggccttgaactctgggcggcagctcatgcacttcctgcccaagtggcattcactccttacgcaccagaacctggctcaacctgtcggctgcgcgaatactacgaccagaccgcccaaatgtgttgttccaagtgttcacccggtcagcatgcaaaagtgttctgcactaagacctccgataccgtctgtgattcgtgtgaggactcgacctacacccagctgtggaattgggttcctgaatgtctgtcgtgtgggtcccgttgttcatccgatcaggtcgaaactcaggcatgcactagggagcagaatagaatttgcacttgtcggcccggatggtactgtgcactgagcaagcaagagggatgtcggctgtgcgctcctctgagaaaatgcaggcctgggtttggagtcgcacggcctggtactgagacttcagatgtggtgtgtaagccgtgcgccccgggaaccttttccaacaccactagctccaccgacatttgtcgccctcatcagatttgcaatgtggtggcaatccctggtaacgcctcgatggacgctgtgtgcacctcaacctcgccaactagatcaatggcccctggtgctgtgcacctgccacagcctgtgtccaccagatcccagcacactcagccgaccccagaaccttccactgccccatccacgtcctttctccttccaatgggtccttcacctcctgccgagggaagcactggggatgagcccaagtcgtgtgataagacgcacacttgtcctccatgcccggcgcctgaactccttgggggaccttctgtctttcttttccctcctaagccaaaggatacgctcatgatctcgaggacccctgaggtgacttgtgtggtcgtggacgtcagccacgaagatcctgaagtcaagttcaactggtacgtggacggggtcgaggtccataacgccaagactaagccacgcgaggaacagtacaacagcacttacagagtcgtcagcgtccttacggtgctgcatcaagactggctgaacggaaaagaatacaaatgtaaggtgtcaaataaggcactgccagcacctattgaaaagaccatctcaaaggcaaaaggtcagcctcgagaacctcaagtgtacactctgccaccaagcagagaggagatgactaagaaccaagtgtcgctcacttgtcttgtcaaggggttttacccatccgacatcgccgtcgaatgggaatccaacggacaacccgagaataactacaagactactccccctgtgctggatagcgatggttcattcttcctgtactcgaagctgaccgtggataaaagcaggtggcagcaaggtaatgtcttttcatgctccgtgatgcatgaagcgctgcacaatcactacactcaaaagagcctctccctttctcccggtaag

SEQ ID NO: 15509 - DNA, 1467 bp, synthetic construct
  misc_feature 1..1467: note = source = /note="Description of Artificial Sequence: Synthetic coding sequence"
  source 1..1467: mol_type = other DNA
atggcaccagtggcggtgtgggcagcgctcgccgtcggactcgaactgtgggcggcggcacacgcccttccggctcaagtcgctttcacgccgtatgccccggagccgggctcgacttgtcggctgcgggaatactacgaccagaccgcccagatgtgctgctcgaagtgctcaccaggacagcatgcaaaggtgttctgcaccaagacctccgacactgtgtgcgacagctgcgaggattcaacctatacccagctctggaattgggtgccggagtgcctgtcctgtggatcgaggtgttcctccgaccaggtcgaaacgcaggcctgcacgagagaacaaaaccggatctgcacttgccgaccgggctggtactgcgccctgagcaagcaggaagggtgcagattgtgcgcacctctgagaaagtgcaggcccggattcggggtggcacggcccggaactgaaacttcggacgtcgtgtgtaagccatgcgctccgggcaccttctcaaacactacttcgagcaccgacatctgccgaccccatcaaatctgcaacgtggtggcaattccgggcaatgcttcgatggatgccgtgtgcacttctacttctccgaccagaagcatggctccgggagccgtgcacctgcctcaaccagtgagcacccgcagtcagcatactcaacctaccccggagcccagcaccgccccatccacttcgttcctgctgccgatgggtccaagcccgcccgcggaaggttcaacgggagatgaaccgaagtcctgcgataaaacccatacctgcccgccctgtcctgccccggagttgctggggggcccatctgtgttcctgttcccgccaaagccaaaggacactctgatgatctcgcgaaccccggaggtgacttgtgtagtcgtcgacgtgtcgcacgaggacccagaggtcaaattcaattggtacgtggacggagtggaagtgcacaatgccaagacgaagccgcgcgaggaacagtacaactctacttaccgggtcgtgtccgttttgaccgtgctgcatcaggactggctcaatgggaaagagtacaaatgtaaggtgtcaaataaggccctgccggcccccatcgagaaaaccatcagcaaggccaagggacagccgagagaaccacaggtgtacacgctcccaccttcccgcgaagaaatgaccaaaaaccaggtgtcactgacctgcctggtcaagggcttctacccttcggacattgccgtcgaatgggaatcaaacggacagccagagaacaactacaagactactccgccggtgctcgactcggatggtagcttcttcttgtacagcaagctgactgtcgacaaaagccggtggcagcagggtaacgttttttcgtgttccgtgatgcacgaagccctccacaatcactacacccagaagtccctgtccctgagccctggaaag

SEQ ID NO: 15510 - DNA, 1467 bp, synthetic construct
  misc_feature 1..1467: note = source = /note="Description of Artificial Sequence: Synthetic coding sequence"
  source 1..1467: mol_type = other DNA
atggccccagtggccgtctgggccgctctagctgtgggtctggagttatgggcagccgcccacgccctgcctgcccaggtggctttcactccctatgcgccagagcccggtagcacttgccggttgcgggaatattatgaccagactgcacagatgtgttgcagtaagtgttccccgggtcagcacgccaaggtattctgcacgaagacgtccgatacggtgtgcgatagttgtgaggatagtacctacactcagttgtggaattgggtcccagagtgcttgtcctgtgggtcccgctgctcctccgaccaggtggagactcaagcatgcacgcgggaacagaatcggatttgcacctgtcgtcctgggtggtactgtgctctctctaagcaagaaggctgtcgcctttgcgctccacttcgaaagtgtagaccaggcttcggagtggctaggcccggcaccgagactagcgacgtggtgtgtaaaccctgtgcccccggcacattttccaatactacctcttccacagacatatgtaggccacatcagatatgtaacgtggtggctatccccggaaatgctagcatggacgccgtgtgtacaagcacgtctcccacccgttccatggcccccggcgccgtccacttgcctcagcccgtgtccacccgttctcagcatacacagccgacccccgagccatccacggcaccttccacctctttcctgctaccaatgggcccatccccaccagccgaagggtcaaccggcgacgaaccgaagagctgtgataagacacacacctgtcctccctgcccagcaccagaactgctggggggaccgtcggtattcttgttcccccccaagcccaaagacacgctgatgatttcccgcaccccagaagtcacctgtgttgttgttgacgtgtctcacgaggatccagaggtgaaattcaattggtatgtcgatggagtcgaggtgcacaatgctaagactaagcctcgggaggaacaatataactctacataccgggtggttagcgtgttgaccgtcctgcatcaagattggttgaatgggaaggaatataagtgtaaagtatcaaacaaagccttgcctgcccctattgagaaaaccatatctaaggcaaagggccagcctcgcgagccacaggtgtacacacttccaccctcccgggaggagatgaccaagaaccaggtgagcctgacttgtctcgtcaagggtttctatccaagtgacatcgcggtcgagtgggaatccaacggccaacctgagaacaactacaaaaccacaccccccgtcctggattcagacggttccttcttcctgtactccaagctgactgtcgataaaagccgctggcagcaaggtaatgtgttctcttgctctgttatgcacgaggctctacacaatcactacacacaaaaaagtttgtcactctctcctggcaag

SEQ ID NO: 15511 - DNA, 1467 bp, synthetic construct
  misc_feature 1..1467: note = source = /note="Description of Artificial Sequence: Synthetic coding sequence"
  source 1..1467: mol_type = other DNA
atggcccccgtggcggtgtgggcagcgctggccgtgggattggagctgtgggctgccgcccacgcgctgccagcccaggtcgcattcactccctacgcaccagagccaggatcaacgtgccggctgcgcgaatactacgatcagacggcccagatgtgctgctcaaaatgctcgcctggacagcacgccaaggtcttttgtaccaagacttctgataccgtctgcgactcttgcgaagatagtacctacacgcaactctggaattgggtccccgagtgtcttagctgcggaagcagatgctcatcagaccaggtggaaacccaggcctgcacgagagagcagaaccgcatctgcacttgtcgcccgggctggtattgcgccctgtcgaaacaggaaggatgccggctgtgcgctcccttgcggaagtgtcgcccgggatttggcgtcgcccgccctggaactgaaaccagcgatgtcgtgtgcaagccgtgtgctcctggaaccttttccaacactacctcctccactgacatctgccgcccgcaccagatctgcaatgtggtggccattccggggaatgcatccatggacgccgtgtgtacttccacctcccctactcggtcgatggcacctggtgcggtgcacctcccacaaccggttagcacccgaagccagcacactcagcccacgccagagccgtcaacggccccgtccacctccttcctcttgcctatgggaccgagcccaccggcggagggcagcacgggagacgagccaaagtcatgcgacaagacccatacctgtccgccatgtccggcacctgaactgctgggcggcccgtcggtgtttctgttcccgccgaaacctaaagacaccttgatgatctcgagaaccccagaagtgacttgtgtggtggtggatgtctcccatgaggatccagaggtgaaattcaactggtacgtcgatggggtcgaagtgcataacgcaaaaactaagccccgcgaagagcaatacaactcaacttaccgggtggtcagcgtgctgacggtgctgcaccaggattggctcaatggcaaggaatacaagtgtaaagtgtcgaacaaggcattgcctgcgccgattgagaaaactatctcgaaagcgaagggccaaccgcgagagccgcaagtgtataccctgccaccttcccgggaggagatgaccaaaaaccaagtgtcactgacctgtcttgtcaagggcttttacccgtcagacatcgcggtggaatgggagtccaatggacaaccggaaaacaactacaaaaccacgcctccggtgctggacagcgacggtagcttctttctgtacagcaagctcactgtcgacaagtcccgctggcaacaggggaacgtgtttagctgctccgttatgcacgaagcgctgcataaccattacacccagaaatcgctgtcactcagtccgggaaaa

SEQ ID NO: 15512 - DNA, 1467 bp, synthetic construct
  misc_feature 1..1467: note = source = /note="Description of Artificial Sequence: Synthetic coding sequence"
  source 1..1467: mol_type = other DNA
atggcaccagtagccgtctgggcggctctggccgtggggctggagctttgggcggcggctcacgccctgccagcacaagtcgccttcacgccctacgccccggagccgggatcgacctgccggctcagagaatactacgaccaaactgcgcagatgtgctgctcaaaatgctcgcctggacagcacgccaaggtcttttgcactaagacttccgacactgtgtgtgactcatgcgaggacagcacctacactcagctgtggaactgggtgccagaatgcctgtcatgtggaagtcgctgttcgtccgatcaggtggagacgcaggcttgtaccagagagcaaaatcgcatctgcacctgcaggccggggtggtactgtgccttgtccaagcaagagggatgccggctctgcgcgccgctccgtaaatgccggccgggctttggcgttgcacgccctggaacggaaactagcgacgtggtctgcaagccgtgcgcccctggaactttcagcaacaccacctcaagcaccgatatctgccgcccgcaccagatctgtaatgtcgtggccatcccaggaaacgcttctatggacgcggtgtgcacgtcgacttcacccacccggtccatggcaccgggagcagtgcacctgccccaaccggtgtcaacccgaagccaacacactcagccaaccccggaaccatcaactgccccttccacctcattcctgctgcccatgggaccttcgccgcctgcggaagggtccaccggtgatgaacctaagagctgcgataaaacccatacctgcccaccgtgcccagccccggagctcctgggcggaccttccgtgtttctcttccctccaaagccgaaggatactctcatgatttcgagaacgccggaagtcacctgtgtggttgtggatgtatcgcacgaggacccggaagtaaagttcaactggtacgtggatggcgtcgaagtgcacaacgcaaagactaagccacgcgaagaacaatacaattctacttaccgggtggtgtcggtactgaccgtgctgcatcaggactggctgaatggtaaggagtacaaatgcaaggtgtccaacaaggctttgcccgcccccatcgaaaagactatttcgaaggcaaaaggacaaccgagagagccgcaggtctataccctgccaccgtcccgcgaagaaatgaccaaaaatcaggtgtctcttacttgtcttgttaaggggttctacccatcggatatcgctgtggaatgggaatccaacggtcagcccgagaacaattacaagaccacgccaccggtcttggactccgacggctcgttcttcctctatagcaagctgacggtcgacaaaagcaggtggcagcagggcaacgtctttagctgctcggtgatgcatgaagctctccataaccattacactcagaaatcattgagcctgagtccgggaaag

SEQ ID NO: 15513 - DNA, 1467 bp, synthetic construct
  misc_feature 1..1467: note = source = /note="Description of Artificial Sequence: Synthetic coding sequence"
  source 1..1467: mol_type = other DNA
atggctcccgtagctgtatgggcggccttggctgtcggccttgagctgtgggccgccgcccacgccttgccggcccaggtggcctttaccccctacgccccagaaccaggcagcacatgtagactcagggaatattacgatcagacggcccaaatgtgttgcagtaagtgctcccctggtcaacacgctaaagtcttttgtaccaagacctccgacacagtttgtgattcctgtgaagactccacctatacccagttgtggaattgggtcccagagtgcctgagctgcggttctcgatgcagttcagatcaggttgagactcaggcgtgcacgagagagcagaatcggatctgcacatgccgacccggctggtactgtgcgctttctaagcaggagggatgcagactgtgcgcaccattgcgcaagtgcaggcctggatttggtgtggcccggcccggtactgagacatccgatgtggtatgcaagccctgcgctcctggcacattctctaatactaccagttccacagacatctgcagacctcaccagatctgtaacgtggtggctattccgggtaatgcctccatggatgccgtgtgcacgtcaacgtcccccacgcggtctatggcccccggcgcggtacacctccctcagcccgtctccaccaggtcccagcacacacaacccactccagagccatctactgctccaagtaccagttttttgctgccgatgggaccttctccaccagccgaagggagcaccggagacgaaccaaagtcatgtgataagactcacacctgtcccccctgtcctgctccggaactgctggggggtcccagcgtgtttttgtttccacctaagcccaaggatacactgatgatatccagaacccctgaggtgacctgtgtggtggttgacgttagtcacgaggaccccgaggtaaagtttaactggtatgtggatggtgtggaagtgcataacgccaagaccaagcccagggaggagcagtataacagtacctaccgagtggtctctgtactgacagtcctgcatcaagactggttgaatggaaaggagtataaatgtaaggtcagtaacaaggctcttccagcacccattgagaagacgatcagcaaagcgaaagggcagcccagggagccccaagtatacactctgcctccaagcagggaggagatgactaagaaccaagtgtccctcacatgcttggtaaaggggttctaccctagtgacattgccgtcgaatgggaatctaacggtcagcccgagaataattacaaaactaccccgcccgttctggacagcgatggcagtttcttcctgtacagtaagctcactgtcgacaaatcaaggtggcaacaaggcaacgttttttcttgctcagttatgcatgaggctcttcataatcattacacacaaaaatcactgtccctttctcctgggaag

SEQ ID NO: 15514 - DNA, 1467 bp, synthetic construct
  misc_feature 1..1467: note = source = /note="Description of Artificial Sequence: Synthetic coding sequence"
  source 1..1467: mol_type = other DNA
atggctcctgtcgcagtttgggcggctcttgcggtggggctcgagctgtgggcggcggcgcacgcgctgcctgcgcaagtggcattcaccccatacgccccggagccgggcagcacctgccgtctccgcgaatactacgaccaaaccgctcagatgtgctgctctaagtgctcgccaggccagcacgcaaaagtgttctgcaccaagaccagcgataccgtttgcgactcatgcgaggactccacctatacccaactgtggaactgggtcccggagtgcctgagctgcggatccagatgctcatcggaccaggtggaaactcaggcgtgcactcgcgaacagaaccggatatgtacctgtagaccgggatggtactgtgcgctctcgaaacaagaaggctgccggttgtgcgccccgctgcggaagtgtaggcctgggtttggcgtggcccggcctggaaccgaaacctcagacgtcgtgtgcaaaccgtgtgccccaggaaccttctccaacaccacctcatcaacggacatctgccgcccccaccaaatttgcaatgtggttgccatcccgggcaacgcttcgatggacgccgtgtgcacctcgacgtcacccactaggtcgatggcgcctggggcggtccatctgccacagccggtgtccactcggagccaacatacccaaccaactccggaaccttcgaccgcgcctagcacttccttcctgctgccgatgggaccttccccaccagctgagggctcgaccggagatgagccgaaatcatgcgataagactcatacgtgcccaccatgccctgcaccggagctcctgggaggtccgagcgtctttctttttccgccaaagccaaaagacactctgatgatctcacgcacccccgaagtgacgtgcgtcgtcgtggacgtgtcgcacgaagatccggaagtgaagttcaactggtatgtggatggagtcgaggtccacaacgctaagaccaagccgcgggaagaacagtacaattcgacctaccgagtggtgtcggtcttgaccgtcctgcaccaggactggcttaacggcaaagaatacaaatgtaaagtgtccaataaagctctgccggcgccgattgaaaaaactatctcaaaggcaaagggccaaccgcgcgagccacaagtgtacacccttccgccgtcccgagaagaaatgactaagaaccaagtgtccctgacctgccttgtgaaggggttctacccaagcgatatcgccgtggagtgggagtcgaacggacaacccgagaataactacaagactactccaccagtgctcgactcagacgggtccttctttctgtactctaaattgaccgtggataaatcacgctggcagcagggcaatgtgttctcctgtagcgtcatgcatgaagcactgcacaaccattatactcagaagtccctgtcactttcgccgggtaag

SEQ ID NO: 15515 - DNA, 1467 bp, synthetic construct
  misc_feature 1..1467: note = source = /note="Description of Artificial Sequence: Synthetic coding sequence"
  source 1..1467: mol_type = other DNA
atggccccggtcgctgtctgggccgctctggcagtcggattggaactgtgggcagccgcgcatgcacttccagcccaagtggcatttactccgtatgcgccggagccgggctccacctgcagactccgcgaatactacgaccagactgcccagatgtgttgctcaaaatgctcgccgggccaacacgcaaaggttttctgtactaagactagcgatactgtctgtgactcctgtgaggattcaacgtacacgcagctgtggaactgggttccagagtgtctcagctgcggctcccgctgctcctcggaccaagtggaaactcaagcctgcaccagggaacaaaacaggatctgcacctgccgccctggatggtactgcgcactctcgaagcaggagggatgtcgactgtgcgcgcctctgaggaagtgccggcccggattcggggtggcaagaccgggaaccgaaacttcggacgtcgtgtgcaaaccgtgtgccccgggaaccttctccaacactacttcgtcaaccgatatctgccggccgcaccagatctgtaacgtagtggcaatcccgggaaatgcaagcatggacgcggtctgcacgtcgacttcaccaacccgctcaatggccccaggcgcggtccatctcccccaacccgtcagtacccgcagccagcatacccagcctaccccggagccttccactgctccgagcacttcgtttcttttgccgatgggcccgtcgccaccagccgaaggttccaccggcgatgagccgaagtcgtgcgataagacgcacacgtgcccgccatgcccagcacccgagctgctggggggaccaagcgtgttccttttccctccaaagcctaaagacactttgatgatctcgagaacccctgaggttacctgcgtggtggtcgatgtgagccacgaggaccccgaggtgaagttcaattggtacgtcgacggtgtggaggtccataatgctaagacgaagccgagagaggagcagtacaattccacttaccgcgtggtcagtgtgctgactgtcctccatcaggattggctgaacggtaaggaatacaagtgcaaagtttcgaacaaggcgcttcccgctccgatcgagaaaacgatcagcaaagcgaaagggcagccgcgggagccacaggtgtacaccctgccaccgagccgagaagagatgaccaagaaccaagtcagtcttacgtgcctggtgaagggattttacccgagcgacatcgcggtggagtgggaatccaacggacagccagaaaacaactacaagaccacccctccagtcctggactccgatgggagcttttttctctactcaaaactgaccgtggacaagtcaagatggcagcaagggaatgtgttcagctgttccgtgatgcacgaggccctgcacaatcactatactcaaaagtcactgtcactgtcgcctggaaaa

SEQ ID NO: 15516 - DNA, 1467 bp, synthetic construct
  misc_feature 1..1467: note = source = /note="Description of Artificial Sequence: Synthetic coding sequence"
  source 1..1467: mol_type = other DNA
atggctccagttgccgtttgggcagccttggctgtgggtttagaactttgggcagcagctcacgctctgcctgcccaggttgctttcactccttatgcccctgagcctggttctacctgccgcctgcgcgaatattatgaccagacagctcaaatgtgttgttccaaatgctctcctgggcaacatgctaaagtgttttgcaccaaaacctctgatactgtgtgtgatagttgcgaagactccacctacactcagctctggaactgggttcccgaatgccttagctgcggctccaggtgcagctccgaccaggtagagacacaggcctgcactcgagaacagaatcgcatctgcacctgccgcccgggatggtattgcgcactgtctaagcaagagggctgccggctctgcgcccctctccgaaagtgcagacccggatttggcgtggctcgccccggcaccgagacatctgatgtagtgtgtaaaccatgcgcacccggtactttcagtaacaccacctcaagcacggacatctgccgcccccaccagatctgcaatgttgtcgccattcctggcaacgcctccatggacgccgtctgcacttctacctcacctaccaggtctatggctcccggggccgtgcatctgccacagcctgtttcgaccaggtcgcaacatacacaacccacacccgaaccctctaccgccccgtctacctctttcctcctgccaatggggccttcaccacctgccgaaggttccaccggcgatgagcccaagagctgtgacaaaactcatacctgcccaccttgcccggcgcccgaattgcttggtgggccgagtgtctttctttttccaccaaaacctaaggatacactcatgattagccgaacccccgaggtgacttgtgttgtggtcgacgtatcccacgaagatccagaggtgaagtttaattggtacgtcgacggggtcgaagtccacaacgccaagactaagccacgggaggagcagtacaactccacctacagagtagtgtctgtactgaccgtgctacaccaggactggctgaatgggaaagagtacaaatgtaaagtgtccaataaagccttgcccgcgcctatagaaaaaaccatatcaaaagctaaggggcaacctcgcgagccgcaggtttacactctgccccccagtcgcgaggagatgacaaaaaaccaggtctcactcacatgcctggttaagggcttttatccatccgatatagcagtggaatgggagtccaatggacagcctgagaacaactataagactactccgcccgttctggattcggacggcagcttttttctatactccaaactgactgtcgataagagccgctggcagcagggcaatgttttttcttgttccgtcatgcacgaggccctgcataatcattatacgcaaaagtcattaagcctcagtccgggaaag

SEQ ID NO: 15517 - DNA, 1467 bp, synthetic construct
  misc_feature 1..1467: note = source = /note="Description of Artificial Sequence: Synthetic coding sequence"
  source 1..1467: mol_type = other DNA
atggccccagtcgcagtgtgggcagcactcgccgtcggtcttgaattgtgggcagcagcacatgcattgccagcccaagtggcatttaccccttacgcgcctgaaccaggctcaacctgcagactgcgagaatactacgaccaaaccgcacaaatgtgttgctccaagtgctcaccaggtcagcacgcaaaggttttttgtaccaagacgtccgatacggtctgtgatagctgtgaagatagtacctacacccaactctggaattgggtgccagaatgtctgtcatgtgggtcacgctgtagctccgatcaggtggaaactcaggcatgcactagagaacaaaatcggatttgtacgtgtcgccccggatggtactgtgcactgtcgaagcaggagggttgtcgcctctgtgcgcctctgcgcaagtgcagacccggttttggagtggcaagaccggggactgagacttcggacgtggtgtgtaagccctgcgcaccaggaaccttttcaaacactacttcgtcgactgacatctgtcggcctcatcagatctgcaacgtcgttgcaatcccagggaacgcatcgatggatgcagtgtgtacttctacttcgccaactcggagcatggcgccaggagcggtccacctgccccaacccgtgtcgacccgctcacaacatactcagccaactccggagcctagcaccgcaccctcgaccagcttcctgcttcctatggggccttcgcctcccgccgaaggatcgaccggtgacgagccaaaatcatgtgacaaaacccacacctgtcctccttgcccagcacccgagctgcttggcggaccctccgtgtttcttttccccccaaagccaaaggacaccctgatgatctcgcgtaccccagaagtcacttgcgttgtggtggatgtcagccacgaagatcctgaagtgaagttcaattggtacgtggatggagtggaagtccataacgccaagaccaagcctagggaagaacaatacaactccacttacagggtggtgtccgtgcttactgtacttcatcaagattggctgaacggcaaagagtacaagtgtaaagtctccaacaaggcacttccagcgccgatagagaaaacgatttcgaaggcaaaaggacaacctcgagagccacaggtgtacaccctgcctccgagcagagaagaaatgaccaagaaccaagtgtcccttacgtgcttggtgaaaggtttctacccctccgacatagccgtggaatgggaatccaatggacagcctgagaataactacaagacgacccctccagtgcttgattcggatggtagcttttttctttactcaaaactcactgtggataagagccgttggcagcagggcaacgtctttagctgttccgtgatgcatgaggcactgcacaaccactacacccaaaaaagcctttcactgtcccccggaaag

SEQ ID NO: 15518 - DNA, 1467 bp, synthetic construct
  misc_feature 1..1467: note = source = /note="Description of Artificial Sequence: Synthetic coding sequence"
  source 1..1467: mol_type = other DNA
atggcaccggtcgcggtgtgggcagcactcgcagtgggactggaactgtgggccgcagcccatgccctgccggcccaggtggcatttaccccgtatgcccctgaaccaggctcgacttgtcgcctccgcgagtactacgatcagaccgcccaaatgtgctgttcgaagtgttcacctggtcagcatgcaaaggtgttttgtactaagacctcggacaccgtctgtgactcctgtgaagattcaacttacacccagctctggaactgggtgcctgaatgtctgtcgtgcggaagcagatgttcttcagatcaagtggaaactcaagcctgcaccagggagcaaaaccgcatttgtacgtgccgtcccggctggtactgtgccctgtcgaagcaagagggatgtagactgtgtgctcccctgcgtaaatgtagacccggctttggagtggcccgcccaggcactgaaacctccgatgtggtgtgtaagccctgtgcaccaggaaccttcagcaacactaccagctcaaccgacatatgccgccctcaccaaatttgtaacgtggtcgcgattccgggaaatgcctctatggacgcggtctgtacctccacctcccccactcgctcgatggcacctggggccgttcatcttccccaaccagtgagcaccagatcccagcatacccaacctaccccagaaccgtccaccgcaccgtcgactagctttctgctcccaatgggaccatcgcctcctgcagagggatccaccggtgacgaacctaaatcctgcgataaaacccatacttgtccgccttgtccagcccctgaactgcttggtggtccttcggtgtttctcttccctccaaagcctaaagatacccttatgatcagcagaacgccggaagtcacttgtgtggtggtcgatgtgtcccatgaagatccagaagtcaagtttaactggtacgtggacggagtcgaggttcataatgcaaagaccaagccccgcgaggaacagtacaactccacctaccgggtcgtgtccgtccttactgtgttgcaccaagattggcttaatggaaaggaatacaaatgtaaggtgtcgaacaaggcccttcctgcgcccattgaaaagacgataagcaaggcaaaaggacaaccccgagagccacaagtctacactctgccaccatccagagaagaaatgaccaaaaaccaagtgagtctcacctgcctggtgaagggtttttaccctagcgatatcgccgtggaatgggagtctaatggacagcccgagaacaattacaagaccactcctccagtgctggattccgatggatcatttttcctctactccaagctcaccgtcgataaaagccggtggcagcagggtaacgttttcagctgctccgtcatgcatgaagcccttcataaccactacactcagaagtcactttccctgtcccccggaaaa

SEQ ID NO: 15519 - DNA, 1467 bp, synthetic construct
  misc_feature 1..1467: note = source = /note="Description of Artificial Sequence: Synthetic coding sequence"
  source 1..1467: mol_type = other DNA
atggcacccgtggcagtatgggcagcccttgccgtggggcttgagctctgggctgccgcccatgcgctgcccgcccaggttgcctttactccctatgcccctgagcccgggtctacatgccggttacgtgaatattatgaccagaccgcacaaatgtgttgttcgaaatgcagtcctggccagcacgccaaagtattctgcacaaagacctccgacactgtatgcgacagttgcgaagactcaacatacacacaactgtggaattgggtccctgaatgtctgtcttgcggatcacgttgctctagtgaccaggtggagacccaggcctgtacacgcgaacagaacagaatctgcacgtgcaggcccggctggtattgcgccctgagtaaacaggagggttgtcggctgtgtgcacccctgaggaaatgtcgcccaggcttcggagtcgcgcgacctgggacagaaacatctgacgtggtttgcaagccttgcgctcccggaaccttctccaataccacaagctccactgacatatgtcgcccacaccagatctgtaatgttgtcgcaattccagggaacgcttccatggacgcagtctgcacctctacttcacccacgagatccatggcccccggagccgtgcatttacctcagcccgtcagcacacggtcgcaacacactcagcctacaccagagccttccaccgctccctctacttcttttttgctgcccatggggccgtccccccctgctgaagggtccacaggcgacgaaccaaagagttgcgataagacacatacatgcccaccatgtccagccccagaacttctcggtgggccctccgtatttctgtttccacccaaacccaaggacactttaatgataagccggacgcctgaggtcacatgcgtggtcgtggatgtcagccacgaggatcctgaggtgaagtttaactggtacgttgatggcgttgaagttcacaatgcgaagaccaagccaagagaggaacagtacaattccacgtatagggtggtgtccgtcttgaccgtgctgcatcaagactggctgaatggtaaggaatacaaatgtaaggtgtcgaataaagccctcccagccccgattgagaagacaatatctaaagcaaaaggccagccccgtgaacctcaggtgtatacgctgccacccagccgggaggagatgacaaagaatcaggtatctctcacttgtttggttaaaggtttctatccgtccgatatcgccgtggaatgggagagtaacggccagccagagaataactataagaccacccccccggtccttgacagcgatggtagcttcttcctgtatagcaaacttaccgtggacaaaagccgctggcaacagggcaacgtgtttagctgttctgtcatgcatgaagcattgcacaaccactacacccagaagtcattatctttgtcccctggcaaa

SEQ ID NO: 15520 - DNA, 1467 bp, synthetic construct
  misc_feature 1..1467: note = source = /note="Description of Artificial Sequence: Synthetic coding sequence"
  source 1..1467: mol_type = other DNA
atggccccggtggcagtgtgggctgcacttgcagtcggactggaactgtgggcagccgcccatgcacttcccgcacaagtggcatttaccccatacgcacctgagccgggatcgacttgtagactccgcgaatactatgatcaaacggcacagatgtgttgtagcaagtgctcgcctggtcaacatgccaaggtcttttgcaccaagacctcggataccgtgtgcgactcgtgcgaagattcgacttacacccaattgtggaattgggtgccggaatgcctttcatgtggctcgcgatgtagcagcgaccaggttgaaactcaagcatgtacccgtgagcagaacaggatttgcacttgccgaccgggttggtactgtgccctgtcaaaacaggaagggtgccggctctgtgcccctctccggaagtgccgtccaggatttggtgtcgcccgaccaggaactgagacgtcagatgtggtgtgcaagccttgcgctcctggtaccttctccaatacgacttcctcaacggatatttgtaggccccaccaaatatgtaacgtcgtggcaattcctggaaacgcgagcatggatgcagtgtgtacgtccacttcacccacgcggtcaatggcccctggtgccgtgcaccttcctcaacctgtgtctacgcgctcgcagcatacgcagcctacccccgagccttcaacggcaccttcgaccagctttctccttccaatggggccttcgccaccagcagagggatcgactggggatgaacccaagagctgtgataagacccatacgtgcccaccttgtcccgccccggagctgctcggaggtccatcagtctttctgttcccacctaagccaaaggatactctgatgatctcacgtactcctgaggtcacttgtgtggttgttgacgtctcacatgaggaccctgaggtgaaattcaactggtacgtcgatggagtcgaggtccataatgcaaagactaagcctagagaggaacagtataactcaacttaccgggtggtgtcagtgctgactgtgctgcaccaagactggttgaacggaaaagaatacaagtgtaaagtgtcgaacaaggccctcccagcacctatcgaaaagactattagcaaggcaaagggccagccgagagagcctcaagtgtacactcttcctccctctagggaagaaatgactaagaaccaggtgagccttacttgtctggtgaaggggttttacccctctgatatcgcggtggaatgggaatccaacggtcaacctgaaaacaattacaagaccacccctccggtcctggattcagacggatcatttttcctgtactccaagctcaccgtggataagagccgctggcagcaagggaacgtgttcagctgctccgtgatgcatgaagcactccataaccactacacccaaaaatccctgtcactgtccccgggaaag

SEQ ID NO: 15521 - DNA, 1467 bp, synthetic construct
  misc_feature 1..1467: note = source = /note="Description of Artificial Sequence: Synthetic coding sequence"
  source 1..1467: mol_type = other DNA
atggcacccgtcgcggtgtgggccgctctggcggtggggctcgagctttgggcggcagcacatgcactgccagcccaggtcgcatttactccatacgcacctgaaccaggttccacctgtagacttcgcgagtactacgatcaaactgcacaaatgtgttgtagcaaatgctcacctggacaacatgccaaggtgttctgcacgaaaaccagcgataccgtctgcgactcctgtgaggactccacctacactcaactgtggaactgggttccggaatgccttagctgtggatccagatgctcatccgatcaagtggaaacccaggcgtgtactcgtgaacaaaacaggatttgtacgtgtcggcccggttggtactgtgccctctcgaaacaagagggatgtcgactgtgtgcaccactgcggaagtgtagaccaggtttcggagtggcacggcccggcaccgaaacttccgacgtggtgtgtaaaccgtgcgcacccggtactttctccaacacgacttcgtcaacggacatatgtcgaccgcaccaaatttgcaacgtggtcgcgattccaggaaacgcatcaatggacgcagtctgtacgtccacttccccaactcgtagcatggctccaggtgccgtgcatctcccacaacctgtgagcactaggtcacagcacactcaaccaactcccgaaccctcaaccgcaccttcaacctcctttctgcttcccatgggaccgtcgcctcctgcagaagggtcaacgggcgatgaacccaagtcctgcgacaaaacccatacgtgtcccccttgtcctgcacccgagctcctcgggggccctagcgtgttccttttccctcctaagccaaaggatacgcttatgatatcacgaactccagaagtgacgtgcgtggtggtggatgtgtcacatgaggaccctgaggtgaagtttaactggtacgtcgacggtgtcgaagtccataacgccaagaccaaacctcgcgaagagcagtacaattcgacttacagagtggtttccgtgctcaccgtcctgcatcaggattggctcaatggcaaagaatacaagtgcaaggtgtccaacaaggcactccctgcacctatcgaaaagaccatttccaaggcgaagggtcagcctagggagccacaagtctataccctgccaccttcaagagaagaaatgaccaagaaccaagtgtcattgacctgtctggtcaagggtttttacccctcggacattgcggtggaatgggaatccaacggtcaacctgaaaacaattacaagactactccaccagtgctggattcggatgggagcttctttttgtactctaagctcaccgtggataaatccagatggcagcaaggaaacgtgttctcgtgttcggtgatgcatgaggcgctgcataatcattacactcagaagtcactctccctgtcgcccggtaaa

SEQ ID NO: 15522 - DNA, 1467 bp, synthetic construct
  misc_feature 1..1467: note = source = /note="Description of Artificial Sequence: Synthetic coding sequence"
  source 1..1467: mol_type = other DNA
atggcgccggtagcggtatgggcggcgttagcggtaggtctagaattatgggcggcggcgcatgcgctaccggcgcaagtagcgtttacgccgtatgcgccggaaccgggttcgacgtgtcgtctacgtgaatattatgatcaaacggcgcaaatgtgttgttcgaaatgttcgccgggtcaacatgcgaaagttttttgtacgaaaacgtcggatacggtatgtgattcgtgtgaagattcgacgtatacgcaactatggaattgggtaccggaatgtctatcgtgtggttcgcgttgttcgtcggatcaagttgaaacgcaagcgtgtacgcgagaacaaaatcgaatatgtacgtgtcgaccgggttggtattgtgcgttatcgaaacaagaaggttgtcgactatgtgcgccgctacgtaaatgtcgtccgggttttggtgttgcgcgtccgggtacggaaacgtcggatgttgtttgtaaaccgtgtgcgccgggtacgttttcgaatacgacgtcgtcgacggatatatgtcgaccgcatcaaatatgtaatgttgtagcgataccgggtaatgcgtcgatggatgcggtatgtacgtcgacgtcgccgacgcgatcgatggcgccgggtgcggtacatctaccgcaaccggtttcgacgcgttcgcaacatacgcaaccgacgccggaaccgtcgacggcgccgtcgacgtcgtttttactaccgatgggtccgtcgccgccggcggaaggttcgacgggtgatgaaccgaaatcgtgtgataaaacgcatacgtgtccgccgtgtccggcgccggaattactaggtggtccgtcggtatttttatttccgccgaaaccgaaagatacgctaatgatatcgcgtacgccggaagtaacgtgtgtagtagttgatgtatcgcatgaagatccggaagttaaatttaattggtatgtagatggtgtagaagtacataatgcgaaaacgaaaccgcgtgaagaacaatataattcgacgtatcgagttgtttcggttttaacggttttacatcaagattggctaaatggtaaagaatataaatgtaaagtttcgaataaagcgttaccggcgccgatagaaaaaacgatatcgaaagcgaaaggtcaaccgcgagaaccgcaagtttatacgctaccgccgtcgcgagaagaaatgacgaaaaatcaagtatcgttaacgtgtctagtaaaaggtttttatccgtcggatatagcggtagaatgggaatcgaatggtcaaccggaaaataattataaaacgacgccgccggtattagattcggatggttcgttttttctatattcgaaattaacggtagataaatcgcgttggcaacaaggtaatgttttttcgtgttcggttatgcatgaagcgctacataatcattatacgcaaaaatcgttatcgttatcgccgggtaaa

SEQ ID NO: 15523 - DNA, 1467 bp, synthetic construct
  misc_feature 1..1467: note = source = /note="Description of Artificial Sequence: Synthetic coding sequence"
  source 1..1467: mol_type = other DNA
atggccccagttgcagtgtgggcagcccttgcagtgggacttgagttgtgggccgctgcccacgcgttgccggcccaagtggcctttaccccttacgcgcccgagcccggatccacctgtcgccttagggaatactacgaccagactgctcagatgtgctgttctaagtgttcacctggccagcatgcaaaggtgttttgtactaagacctccgataccgtctgcgattcttgtgaggattccacctacactcagctctggaactgggtgcctgagtgtctttcgtgtggatcacgttgtagttccgatcaagtggaaactcaggcatgtactcgggagcaaaaccgtatctgtacttgtcggcctggctggtactgcgcactcagcaagcaggagggatgtcgattgtgtgcgcccctcagaaaatgtagacctggattcggtgtggcccgccctggaaccgaaacttcagatgtggtgtgcaagccgtgtgcccctggtacttttagcaataccacctcttcgaccgatatttgccgcccacatcagatttgcaatgtggtggcaatccctggcaatgcctccatggatgccgtctgtacttccacctcgccgacccgctcgatggcccccggggcagtgcatttgccacagccggtgagcaccagatcacaacacacccagcctacccctgagccttctacggcaccgtcgacgtccttcctgcttccaatgggaccatcgccacctgcagaaggatcaacgggcgatgaaccaaagtcatgtgacaagacgcacacctgtcctccttgtccagcacctgagttgttgggaggcccgagcgtgttcctctttccacccaaaccaaaggatactctcatgatttcgagaacgcctgaggttacttgtgtagtcgtggatgtgtcgcatgaggaccctgaagtgaagttcaactggtacgtggacggcgtggaagtccacaatgctaaaaccaagcctcgggaagaacaatacaacagcacttacagagtcgtgtccgtcctgactgtcctccatcaagattggcttaacggcaaggaatacaagtgcaaggtgtccaacaaagcactccctgcaccaatcgaaaagactatttcaaaagcaaaagggcaacctcgagaacctcaagtctacactctccctccatcacgcgaggaaatgactaaaaaccaagtctcgctgacttgtcttgtgaaggggttttacccttcagatattgccgtggaatgggaaagtaacggacagcccgagaataactacaagactacccctcctgtgctggactcggatgggtcgttctttctgtactcaaaacttactgtggataagagcagatggcagcaaggtaacgtcttttcctgttcggtgatgcatgaagcacttcataaccactatacgcagaagtcgctgtcgctgtcccccggtaaa

SEQ ID NO: 15524 - DNA, 1467 bp, synthetic construct
  misc_feature 1..1467: note = source = /note="Description of Artificial Sequence: Synthetic coding sequence"
  source 1..1467: mol_type = other DNA
atggctcccgtggctgtatgggcagcattggcggtgggcctcgaactgtgggcagcggcacacgctctcccagcccaagtcgcgtttactccatacgcacccgagcctgggtctacatgtcgtcttcgagagtattacgaccagactgctcagatgtgttgttctaagtgctcccctggccaacacgctaaggtgttctgcacaaagacttctgacaccgtgtgtgactcctgcgaagactctacatatactcagctgtggaattgggtacctgagtgtctcagttgcggaagtagatgtagtagcgaccaagtcgagactcaagcctgcacaagagagcagaataggatttgtacttgtcgccctggatggtactgcgccttatccaagcaggaaggatgccgactttgcgccccactaagaaagtgccgtcccggattcggagttgcaagaccaggaacagagactagtgacgttgtgtgcaagccttgtgctcctggaactttctcaaacacgacctctagcaccgacatctgtcgaccgcaccaaatttgcaatgtcgtcgcgattcccggcaatgcaagtatggacgctgtttgcaccagcacttcccctacccgttcaatggcgccgggggctgtccatctccctcaacccgtctccactaggtctcagcacacccagccaacaccggaaccaagtaccgcaccatcaacctcgttccttttacccatgggtccgtccccgcccgctgaaggatcaaccggagatgagccgaagtcatgcgataagacccatacctgcccgccgtgccctgcccccgaattacttggagggccttcagtgttcctcttcccgccgaaacccaaagatactctgatgatcagccgcactcccgaagttacttgcgtggtggtggacgtgtcacacgaggacccagaggtcaaatttaactggtacgttgacggagtagaggtccacaacgcgaaaacaaaaccccgggaagaacagtacaatagtacttacagagtggtgtcagtcctgactgtgctccatcaagattggttgaatggaaaggaatacaagtgtaaagtgtccaacaaggcgttgcctgcacctatcgagaaaaccatcagtaaagctaagggtcagccacgagagccccaggtgtacaccctgccaccatcccgcgaagagatgacaaagaaccaggtttcacttacatgcctagttaaaggtttctacccatcagatatcgctgtagagtgggagagtaacggtcaaccggagaacaattacaaaacaacgccccctgtgctggacagtgacggttctttcttcctatattcaaaactcacggttgataaaagtcgttggcagcagggaaacgttttttcgtgctcagtcatgcatgaagccttgcacaaccactacacccagaagagtctgtcactgtctcccggaaag

SEQ ID NO: 15525 - DNA, 1467 bp, synthetic construct
  misc_feature 1..1467: note = source = /note="Description of Artificial Sequence: Synthetic coding sequence"
  source 1..1467: mol_type = other DNA
atggctcccgtagccgtatgggccgcattggcggtgggcctagagctttgggctgcggcccatgccctgcccgcacaggtggccttcactccctacgctcccgagccaggatccacctgcaggttgcgtgagtactatgaccaaaccgcccaaatgtgctgttctaagtgttcaccaggacaacacgcaaaggtgttctgcaccaagacatcagataccgtctgcgacagttgcgaggattctacttatactcaactctggaattgggttcccgagtgtcttagctgtggttctaggtgtagttcagaccaggtagagacacaggcttgcacaagggagcaaaaccgaatatgcacatgtcggccaggttggtactgtgccttgtccaagcaggaaggctgccgcctatgcgctcccctgcggaaatgccggcctggattcggggtggcaaggcctggcacagaaacatccgacgtggtgtgtaaaccctgtgctccgggaacctttagtaacactacctcaagcacggacatttgtaggccccatcagatttgcaacgttgtcgcgatccccggaaatgcttctatggatgccgtgtgtacatctacctcccctacccggtctatggcccctggcgcagtccacctgccccagcccgttagcactcgatcgcagcatacccagccgaccccagaaccatccactgcacctagcacatcctttctgctcccaatggggccatcaccacctgcagagggctccacaggcgacgagcccaagagttgcgacaagacgcatacctgtccgccctgtcctgcacccgagctgctaggtgggccgtccgtgttcctgtttcctcccaagcctaaggataccctgatgatctcacgcacccccgaggttacatgcgtggtggttgacgtttctcacgaagacccagaggtgaaatttaactggtatgtggacggcgtggaggtacacaacgcaaaaaccaaacctagagaggaacagtacaattcaacatacagagtggtctctgttctgacagtgctgcatcaagactggcttaacggtaaggaatataagtgcaaggtgagtaacaaggctctcccagctccaatcgagaagacaatttcaaaggcgaaaggccagccccgcgaaccccaggtgtacactcttcctcctagcagggaagaaatgacaaaaaatcaggtgtctctcacttgcctggtgaagggcttctatccctccgatatcgcagtggagtgggagtccaatgggcagccagaaaacaactataagacaacaccccctgtactggatagcgacgggagtttcttcttatattcaaagctaactgtcgacaagtctcggtggcaacaaggaaatgtgttttcttgttcagtgatgcacgaggcgctccacaaccattacacacagaagtccttaagtttgagtcctggcaag

SEQ ID NO: 15526 - DNA, 1467 bp, synthetic construct
  misc_feature 1..1467: note = source = /note="Description of Artificial Sequence: Synthetic coding sequence"
  source 1..1467: mol_type = other DNA
atggctccagtggctgtatgggcggcgctggcagtaggcttagagctttgggcggcagctcatgctctgccagctcaggtggcctttacgccttatgcaccggagccaggttccacctgccgacttcgtgagtattacgaccagacagcgcagatgtgttgtagtaagtgctctcctggacagcacgccaaggttttctgcaccaaaacctctgatacagtctgtgattcttgtgaagactctacatatacccagttgtggaactgggtgcctgagtgcttaagttgcggctctcgttgctcctcagaccaggtagaaacccaggcctgtactcgagagcaaaacaggatctgcacatgtcggcccggttggtactgtgccctttccaagcaagaggggtgtcggttgtgcgctcccctgaggaagtgtcgcccaggctttggggtggctaggccgggcaccgagacctctgatgttgtttgtaaaccatgcgctcctggcaccttttctaatacgacatccagcactgacatctgtcgaccccaccagatctgtaatgtcgtcgctatcccaggcaatgctagtatggacgccgtatgcacgagtacgagccctacgaggtcaatggctccaggagctgtgcatctaccccagcccgtcagtacgaggtcgcagcatacccaacccacgccggagcccagtaccgccccgtctacaagcttcttgctacccatggggccatctccccccgctgagggttcaacaggagacgaacctaaaagttgcgataaaacccatacgtgccctccctgtccagcccctgaattgcttggagggccatctgttttcttgttcccacctaagcccaaggatacactgatgatcagtaggacaccagaagtgacatgtgttgttgtcgacgtgtcacacgaagatcctgaagtgaagtttaactggtatgtggacggcgtggaggtacacaatgcaaagacaaagccccgcgaagagcagtataactccacatatagggtcgtgtcagttctgactgtcctacaccaggattggctgaatggaaaagaatacaaatgtaaggtcagcaataaagctttaccggccccaatcgagaagacaatttctaaggccaagggccagccgagagagccccaggtttatacactgccaccctcccgtgaagaaatgaccaaaaaccaggtctccctgacttgtctggtgaagggtttctatcctagcgacatcgctgttgagtgggagtctaacggacaacccgaaaataattataagacgactccccctgttctggactcagatggctccttcttcttatacagcaaactcacagttgataaatctcgatggcaacaaggtaacgtgttcagctgctccgtcatgcacgaggccctgcataaccactacactcaaaaaagcctaagtttgtcccctggcaag

SEQ ID NO: 15527 - DNA, 1467 bp, synthetic construct
  misc_feature 1..1467: note = source = /note="Description of Artificial Sequence: Synthetic coding sequence"
  source 1..1467: mol_type = other DNA
atggcgcctgtggctgtgtgggcggcccttgctgtcggcctggaactgtgggccgcggctcacgccctgccggcccaagtggcattcaccccatacgcacccgaaccgggatcgacttgtaggttgagagaatactacgaccagactgcacagatgtgttgctccaaatgcagcccaggtcaacacgccaaggtgttctgcaccaaaacctcagatactgtctgcgactcgtgcgaggactccacctacacccagctgtggaactgggtgccagagtgtctttcgtgcggatcgcggtgctcaagcgaccaggttgagactcaggcgtgtacccgcgagcaaaaccggatctgcacctgccgaccggggtggtactgcgcgctgtccaagcaagagggatgccgcttgtgcgctcctcttcgtaagtgccgcccgggattcggcgtggccagaccaggaaccgaaacttcagacgtggtttgcaagccgtgcgccccaggtaccttctccaatactacgtcctccaccgacatctgcagaccccatcaaatttgcaacgtggtggccattccaggaaatgcctcgatggacgccgtgtgcacctcgacttccccgacccggtctatggcaccaggcgcagtgcatctcccgcaaccggtgtccactcgcagccagcacacgcagccgacccctgagccttccactgcgccgtcgacttccttcctgctgccgatgggaccgtcgcctccagctgaaggctcaaccggagatgagcccaaatcctgtgacaagacccatacttgtccaccttgcccagctcccgaactgctgggaggccctagcgtgttcctgtttccgcctaagccaaaggacaccctgatgatctcgcggactccggaagtcacttgtgtggtcgtggatgtgtcacatgaagatcccgaagtcaagttcaattggtacgtggacggggtcgaagtccacaacgcgaaaaccaagccacgcgaggagcaatacaacagcacttaccgggtcgtgtcagtgctgacggtactccaccaggattggctcaacggcaaggaatacaagtgcaaggtgtctaacaaggccctgcctgcaccgatcgagaaaactatctcgaaggccaaagggcagccgagagagccgcaggtgtatacgctcccgccgagcagggaagagatgactaagaatcaagttagtctcacctgtctcgtcaagggattttacccgtccgatatcgcagtggagtgggaatcgaacggtcagcccgaaaacaattacaagactaccccgcccgtcctggattcggacggatcgttcttcctctatagcaaactcacggtggataaatcccgctggcagcaggggaacgtctttagctgcagcgtgatgcacgaagcgctgcacaatcattacacccagaagagcctctcattgtcaccaggaaag

SEQ ID NO: 15528 - DNA, 1467 bp, synthetic construct
  misc_feature 1..1467: note = source = /note="Description of Artificial Sequence: Synthetic coding sequence"
  source 1..1467: mol_type = other DNA
atggccccagtggcggtgtgggccgctctggccgttggactggagctctgggccgccgctcatgccctccctgctcaagtggcctttaccccttacgcccctgagccggggagcacgtgtcgcctgcgggaatactacgaccagacagcccagatgtgctgtagcaagtgcagcccaggccagcacgcaaaggttttctgtacaaagaccagcgataccgtgtgcgactcctgcgaagacagcacttacacgcagttgtggaattgggtgccagagtgtctatcatgcggttctagatgttcctcagatcaagtggagacccaggcctgcaccagggagcagaaccgaatatgtacctgtcgaccaggctggtattgtgccctctcgaagcaggaaggatgcaggctctgtgcacctttaaggaagtgccgtccaggatttggagtcgctagaccaggtacagagactagtgacgtggtctgtaaaccatgtgcacccggcacgttctcgaatactacttcatcaaccgacatttgccgacctcaccaaatatgcaatgtcgttgcgattccagggaatgctagcatggacgccgtctgcacatcaacatctccaacccgctcaatggcccccggagcagtccatcttcctcagcctgtttccactcggtctcagcacacacaacccaccccggaaccaagcactgctccatcaacctcctttctgcttcccatgggaccatcgccgcctgccgagggctctaccggggacgaacctaagagttgcgataagacgcacacatgcccaccatgcccggcccctgaactattgggcgggccatctgtgtttctctttcctcctaagccaaaggacactcttatgatatcaagaactccagaggtcacttgtgtggtcgtcgatgtgtcacatgaagaccctgaagtgaagttcaattggtatgtcgatggcgtggaggtgcacaacgccaaaaccaagccccgagaagaacagtataatagtacgtatagagtcgtgtcagtgctgacagtcctacatcaggactggctgaatggaaaggagtacaaatgtaaagtcagcaacaaggcgctgcccgccccgatcgagaagacaatttccaaagccaaaggacaaccccgagagccccaggtatacacgctgccaccttccagggaggagatgacaaagaatcaggtcagtctcacatgcttggtcaagggcttttacccatcagatatcgccgtggaatgggaaagcaatggtcagcctgagaacaattataagaccacgcccccagtgctggatagcgatggcagcttctttctttacagcaagctgactgtggataaatcccggtggcagcaggggaacgtcttctcgtgttccgtcatgcatgaagccctgcataaccattacacccagaagtccttgtctctgtccccaggcaaa

SEQ ID NO: 15529 - DNA, 1467 bp, synthetic construct
  misc_feature 1..1467: note = source = /note="Description of Artificial Sequence: Synthetic coding sequence"
  source 1..1467: mol_type = other DNA
atggcccctgtagcagtgtgggccgcgctggctgtgggactggagctgtgggccgctgctcacgccctccctgcccaggtggccttcacgccgtacgcccctgaaccaggctcaacctgccggctgagagaatactacgaccaaaccgcccagatgtgctgtagcaagtgctccccgggacaacacgccaaggtgttctgcaccaagacttccgatactgtgtgcgactcgtgcgaggattccacgtatactcagctctggaattgggtgcccgagtgcctctcgtgcggctcacggtgctcaagcgatcaggtcgagactcaagcctgtactagagagcaaaaccgcatctgtacttgtcgacctggttggtactgcgcactttcgaagcaggaaggatgtaggctctgcgccccccttcggaagtgcagaccgggcttcggagtcgctcgccccggcaccgaaacctccgacgtcgtgtgtaaaccctgcgccccgggcactttttcgaacaccacgtcctcaaccgatatctgcaggccgcaccagatctgtaatgtggtcgcaatcccgggcaatgcaagcatggacgcggtgtgcacctcaacttcgcctaccaggtccatggctccgggagccgtccacttgccgcaacctgtgtcgaccaggagccaacacacccaacctaccccggagccgtcgaccgctccttccacctccttcctccttccaatgggaccctctccccctgctgaaggatcaaccggagacgaacctaaaagctgcgataaaactcacacctgtcccccatgcccggcgcccgagttgctggggggaccttccgtgttcctgttcccaccaaagccaaaggacacgctcatgatctcgcgcactcccgaggtgacctgtgtggttgtggacgtaagccacgaggatccggaagtcaagttcaactggtacgtggatggcgtggaggtgcataacgccaaaacgaaaccacgcgaagaacaatacaactccacttaccgggtggtcagcgtcctgactgtgctgcaccaggactggttgaacggaaaggaatacaagtgcaaagtgtcgaataaagcgctcccagcaccgatcgaaaagactattagcaaagccaagggacagccgcgcgaaccacaggtctatactctgccacctagcagggaagagatgaccaagaatcaagtgtccctcacctgcctggtcaaagggttctacccttcggacatagctgtggagtgggaatctaatgggcagcctgagaataactacaagactactccacccgtcctcgactccgacgggtcctttttcctctacagcaaactgaccgtggataagtcgagatggcagcaaggaaacgtgttcagctgctcagttatgcatgaggcgctgcataaccattacacccagaagtcactgtcacttagcccaggaaaa

SEQ ID NO: 15530 - DNA, 1467 bp, synthetic construct
  misc_feature 1..1467: note = source = /note="Description of Artificial Sequence: Synthetic coding sequence"
  source 1..1467: mol_type = other DNA
atggcacccgtggccgtctgggctgctctagccgtggggctggaactctgggccgcagcccacgcattacccgcccaggtagcttttactccttatgctcctgaacctggatccacgtgtcgtctgcgcgagtactatgaccagactgcacagatgtgttgcagcaagtgctcccccggtcagcacgctaaggtgttctgcacaaaaacatctgataccgtctgtgactcgtgcgaggatagtacatatacacaactctggaattgggtgcccgaatgtctgtcctgcgggtccagatgtagttccgaccaggtagagacacaggcatgtaccagagaacagaatcgcatctgcacctgtaggcctggatggtattgcgcactctccaaacaggaagggtgtcggctgtgcgcccccctgcgcaaatgccgcccgggatttggcgtggccagacccggcactgaaacttctgacgtcgtgtgcaagccttgcgccccgggaacctttagcaacacgacgtcttcaaccgacatttgccggcctcaccagatctgtaacgtggtggcgattcctgggaatgcctccatggatgctgtctgcacgagcacttcccccactcgaagcatggcacccggagcagtgcacctgccacagcccgtgagcacacggagtcaacacacacagcccacccccgaaccctcaaccgcgccaagcacgagcttcctgttaccgatgggcccatcacctcctgccgagggctctacgggagacgaaccaaagagctgtgataaaacccatacgtgtcccccctgtccggcccctgagttacttggcggaccctctgtcttcttgttcccgcccaagccgaaggacactcttatgatctcacggacaccagaggtcacctgtgtggtagtggatgtctctcatgaggatcccgaggttaaatttaattggtacgtagacggcgtggaggtacataacgcaaaaaccaaacctcgcgaggaacagtataactcgacatacagagtggtctctgtcctaaccgtgcttcatcaggactggctgaacggtaaggagtacaagtgcaaggtgagcaacaaagcacttcctgctcccatcgaaaagactatcagcaaagcaaaggggcagccccgcgagccccaggtttacaccctccccccttcaagagaagagatgacaaagaatcaggtttctctgacttgcctagtgaaaggattctacccgtctgacatagccgtggaatgggagtccaatgggcaacccgagaataactacaaaaccactccgccggtgctggattcagacggtagcttttttctttatagcaagctgactgtggacaagagccggtggcaacagggtaacgtttttagttgctccgtgatgcacgaggctctgcataatcactatacacagaagtcgctttcactgtcacctgggaag

SEQ ID NO: 15531 - DNA, 1467 bp, synthetic construct
  misc_feature 1..1467: note = source = /note="Description of Artificial Sequence: Synthetic coding sequence"
  source 1..1467: mol_type = other DNA
atggcaccggtggcagtctgggccgctttggccgtgggcctggagctctgggccgcagcccatgcccttccggctcaagtggcatttactccatacgccccagagcctggaagcacctgcaggctccgggaatactatgaccaaactgctcagatgtgctgctccaagtgctccccgggacaacacgctaaagtcttttgcaccaaaacgtcggataccgtgtgtgactcatgcgaggattcaacttacacgcaactttggaattgggtgccagaatgcctgtcgtgtggatcgcgctgctcttcggaccaagtcgaaacgcaggcgtgcacccgcgaacaaaacagaatctgcacttgccggcccggatggtattgcgcactgtcgaaacaggaaggatgcaggctttgcgcgcctctgcgcaaatgtcggccgggtttcggagtggcccgcccggggactgaaaccagcgatgtcgtctgcaaaccgtgtgcgccaggcactttctccaacactacgtcgtctactgacatctgccgaccgcaccagatctgcaatgtggtcgccatcccgggcaacgcatccatggacgccgtctgcacctcaacttcaccgactagaagcatggcacctggcgcggtgcatctgccacagcctgtgagcactcgctcgcagcacactcagcctacccctgagccgtcaactgccccctccacttcgttcctgctgccgatggggccatcaccgccggcagaaggctcgaccggagacgagccaaagtcgtgtgacaagacccacacttgcccgccatgcccggcacccgagctgctgggaggaccgagcgtgttcctgttccctccaaagccgaaggacacccttatgatctcgagaacgcccgaagtgacgtgcgtggtcgtggacgtgtcgcatgaagatccggaggtgaagttcaactggtacgtcgatggagtggaggtgcataacgccaagactaagccgcgagaggagcaatacaactcgacttaccgggtggtttcggttctgaccgtcctccaccaagactggttgaacggcaaggaatacaagtgcaaggtgtcgaacaaagccctcccagcccctatcgagaaaactatctcaaaggctaagggacagcctcgggaacctcaagtctacactctgccgcccagcagagaagagatgactaagaaccaggtgtcattgacctgccttgtgaagggattctacccgtcggatattgcggtggaatgggagagcaatggacagccggaaaacaattacaagaccactccacctgtgctggattcggacggctcgttcttcttgtactcgaaactgactgtggataaatcgaggtggcaacagggcaatgtgttctcatgctccgtgatgcacgaggcactccataaccactacactcagaaatccctttcgctgtccccaggtaaa

SEQ ID NO: 15532 - DNA, 1467 bp, synthetic construct
  misc_feature 1..1467: note = source = /note="Description of Artificial Sequence: Synthetic coding sequence"
  source 1..1467: mol_type = other DNA
atggctcctgtagctgtttgggctgctttagctgtcggactagaattatgggccgctgcacatgcgttgccagcccaagtcgcttttacgccgtatgctccagaaccaggctctacgtgtagactcagagagtattacgatcaaaccgcacaaatgtgttgcagcaagtgctcaccgggacagcatgctaaggttttctgcaccaaaacgtctgatacagtgtgcgactcttgcgaagatagcacatacacccagttgtggaactgggtccctgaatgcctttcgtgcggtagtaggtgtagcagcgatcaagttgagacacaggcctgcacaagagaacaaaatcgaatttgtacgtgccgtcccggatggtactgtgctttgagtaaacaagaaggatgtcgtctatgcgccccacttcgtaaatgtagacctggatttggagttgccagacctggcacagaaacatctgatgtcgtttgtaaaccatgcgctccaggtaccttctccaatactacatcttcgactgatatttgtagaccacaccagatttgtaacgtggtggccattccggggaatgcttccatggatgcagtctgcacctcaacatctccgacgcggagtatggcaccaggagctgttcacctgccacagcccgtcagtacccgctcgcagcatacccaaccaaccccggagccatcaacggctcccagtacatctttccttctcccaatgggaccgtcacccccagcagaaggaagcacaggtgatgaaccaaagtcatgcgataaaacgcatacctgcccgccatgcccagctccggagcttcttggaggtccgtcagtttttctattccctccgaagcccaaagatacattaatgattagcagaactccggaggttacatgcgttgttgtggatgtatctcatgaggatccagaggtgaagttcaactggtatgttgacggcgttgaagtccacaacgctaagacaaaaccccgtgaagaacagtacaattctacttatagggtggttagtgtgcttacagttttgcaccaggattggttgaatggtaaggaatacaaatgtaaggtgtcgaacaaggcccttcctgctccgatcgagaaaacaatttccaaggcaaaaggacagccgcgtgagccccaggtctacactttaccaccatctcgggaagagatgactaagaaccaagtatcgttaacttgcttagtgaagggattttatccatcagatatcgccgttgagtgggagtcaaatggacaaccagagaataattataaaacaactcccccagtcctagatagcgacggtagtttctttctttactctaaattgacggtcgataagtctcgatggcaacagggaaacgtattttcatgtagtgttatgcacgaggcacttcataaccactatactcagaaaagcttgagtcttagtccaggaaaa

SEQ ID NO: 15533 - DNA, 1467 bp, synthetic construct
  misc_feature 1..1467: note = source = /note="Description of Artificial Sequence: Synthetic coding sequence"
  source 1..1467: mol_type = other DNA
atggcccccgtcgccgtgtgggccgccctagcagtgggtttggagctgtgggctgccgctcacgcgctccccgctcaagtcgccttcacaccctacgcccccgagcccggttccacctgccggttacgtgaatactacgaccaaacggcccaaatgtgctgctccaaatgcagccctggtcagcacgcaaaggtcttctgcaccaagacttccgacaccgtttgtgatagttgcgaggactccacttacacccagttgtggaactgggtgccagaatgcttgtcatgtggtagccggtgcagctcggaccaagtggagactcaggcgtgtacccgcgagcagaatcgcatctgcacctgtagacccggctggtactgtgctctgtccaagcaggagggttgtcgtctctgcgcgcccctgcgtaagtgccggccaggcttcggagttgcccgccccggtactgagacaagcgatgtcgtttgcaaaccttgtgccccaggtaccttttcgaacactacctcctccacagacatatgtcgccctcaccagatctgcaacgtcgtggccattcccggcaacgcttccatggacgccgtctgtacctcaacttcacctacgcgttccatggcgcccggcgcagtccatctccctcagcccgtctccacccgcagccaacacacccaacccaccccggaaccctccactgccccttcaacctccttccttttgcctatgggccctagccctcccgcagaaggttccaccggcgacgagcccaaatcctgtgataagacccatacctgccccccgtgccccgcaccagagctgcttggcggcccttccgtgttcctcttcccccccaagccgaaggacacccttatgatctccaggacgcctgaggtcacttgcgtggtcgtggacgtcagccacgaggaccccgaagtcaagttcaactggtatgtggacggtgtggaggtccataacgccaagactaaacctcgtgaggagcagtacaacagcacctaccgcgtggtgtctgtcctgacggttttgcaccaagactggctgaacggtaaggagtacaagtgtaaggtcagtaataaggcattaccggcccccatcgaaaaaaccatctcgaaggctaagggacagccgagagagcctcaggtctatacattgcctccgtcgagggaggagatgactaagaatcaggtctctctcacttgcctcgtcaagggcttctaccccagcgacattgctgtggaatgggagagcaacggccagccagagaacaattacaagacaacccctcccgtccttgacagcgacggatccttcttcttgtacagcaagctcaccgtggataaaagccgctggcagcagggaaacgttttctcttgctccgtgatgcatgaggcactgcataaccactacacccagaaaagtctgtcgttgtcgcctggaaag

SEQ ID NO: 15534 - DNA, 1467 bp, synthetic construct
  misc_feature 1..1467: note = source = /note="Description of Artificial Sequence: Synthetic coding sequence"
  source 1..1467: mol_type = other DNA
atggcccctgtggcagtgtgggctgccttggctgtcgggctggaactgtgggccgccgcgcacgctttgcctgctcaggtggctttcaccccttacgcaccggaaccaggcagtacttgccggctgcgggaatactatgaccaaacggctcagatgtgctgcagcaaatgtagcccaggccagcatgctaaagttttttgtacgaaaacaagtgatactgtgtgtgactcctgcgaggattctacttacacccagctgtggaattgggtacctgagtgtctgagctgcggaagccgctgcagctccgatcaggtggagacccaggcctgtacacgggagcagaatcgtatctgcacctgccggccaggttggtattgtgcactgtcaaaacaagaaggttgcaggttatgtgctcctctgcgaaagtgcagacccggtttcggggtggcgaggcccgggaccgagacgtctgatgtggtttgtaagccatgcgctcctggcactttttccaacactacttcaagcaccgatatttgtcgccctcatcagatttgtaatgtagttgcgatccctgggaacgcatcgatggacgctgtgtgtacgtctacttccccaacacgcagcatggctccgggcgctgtgcatctcccgcagccagtgtcaactcgaagtcagcacactcagcccacccctgagccttcaacagccccctccacatcatttctactgccgatgggtccctcccctcccgcagagggctccacgggcgatgagccgaagtcttgcgataaaactcatacttgccctccatgtcccgcccccgagctcctgggggggccatcagtgtttctgtttccacctaagccaaaggacacattgatgattagccgcacccccgaagtgacctgcgtggtcgtggatgttagccacgaggaccctgaggtaaagtttaactggtatgtagatggagtagaggtgcacaatgccaaaaccaaacctcgggaggagcagtataactctacctacagagtggtgtcagtactgaccgtcctgcatcaggactggctgaatggcaaggaatataaatgcaaagtgtccaacaaagctctgcctgctccaatcgaaaaaaccatttctaaggcgaagggacagcctagagagcctcaggtttatacactgcctccctcacgagaggaaatgactaaaaatcaggttagtctaacctgtctggtgaagggcttttatccgtcagatattgccgtggagtgggagtctaatggtcagccggagaataattataaaacaacccctccagtgcttgacagtgacggcagtttttttctttattctaaattgaccgtcgacaagtccaggtggcaacaagggaatgtgttctcctgctccgttatgcatgaagccctgcacaatcactatacgcagaaatctctgagtttgagccctggaaaa

SEQ ID NO: 15535 - DNA, 1467 bp, synthetic construct
  misc_feature 1..1467: note = source = /note="Description of Artificial Sequence: Synthetic coding sequence"
  source 1..1467: mol_type = other DNA
atggctccagttgcagtctgggctgctttagctgttggacttgaattatgggctgcagcacatgctttacctgcacaagttgcttttactccatatgctcctgaaccaggatcaacatgtagattgagagaatattatgatcaaacagctcaaatgtgttgttctaagtgttcaccaggacaacatgctaaagtattttgtactaaaacatctgatacagtttgtgattcttgtgaagattcaacatatactcaattatggaattgggttccagaatgtttatcatgtggatcaagatgttcatcagatcaagttgaaacacaagcttgtactagagaacaaaatagaatttgtacatgtagaccaggttggtactgtgcactttctaaacaagaaggatgtagactttgtgcaccattaagaaaatgtagaccaggattcggagtagcacgtcctggaacagaaacttcagacgttgtttgtaaaccatgtgctccaggtactttcagtaacactacttcatctactgatatttgtagaccacatcaaatttgcaatgttgtagcaattccaggtaatgcttctatggatgcagtttgtacatctacttcacctactagatcaatggccccaggagcagttcacttaccacaacctgtttctacaagatcacaacatactcaacctacacctgaaccatcaacagctccatcaacatcttttttacttccaatgggaccatcaccaccagcagaaggatcaactggtgacgaaccaaaatcttgtgataaaacacacacatgtccaccatgtccagctccagaacttttaggaggaccttctgtttttttatttcctccaaagcctaaagatacattaatgatcagcagaactccagaagttacttgtgtagtagtagacgtaagtcatgaagatcctgaagttaaatttaattggtatgttgacggggttgaggtgcataatgcaaaaactaaaccaagagaagagcagtataattctacgtatagagtggtttcagttcttactgtattacatcaagattggttaaacggaaaggagtataaatgtaaagttagtaataaagctttaccagcaccaattgaaaaaactattagtaaagctaaaggacaaccacgtgaaccacaagtgtatacattacctccaagtcgtgaagagatgactaagaatcaagtttcacttacttgtcttgttaaaggattctatccaagtgatattgctgttgaatgggagagtaatggacaaccagaaaataactataaaacaactcctccagttcttgattctgatggaagtttctttttatattcaaagcttactgttgataaatcaagatggcaacaagggaatgtttttagttgttcagttatgcatgaagctttacacaatcattatacacaaaaatcattatcacttagtcctggaaaa

SEQ ID NO: 15536 - DNA, 1467 bp, synthetic construct
  misc_feature 1..1467: note = source = /note="Description of Artificial Sequence: Synthetic coding sequence"
  source 1..1467: mol_type = other DNA
atggctccggtggctgtgtgggctgcactcgctgtggggctggaactctgggccgctgcccatgctctgcccgcgcaagtagcttttaccccctacgcccctgagcccggaagcacctgcagacttagagaatattacgaccagaccgcgcagatgtgctgtagtaagtgctctccaggacagcatgcaaaggtgttctgcactaagacctccgataccgtctgtgacagttgcgaggacagcacatacacccagttgtggaactgggtgcctgaatgtctctcctgtggcagcagatgctccagtgaccaagtggaaactcaggcctgtactagagagcagaacaggatttgtacatgccggcctggctggtactgtgcattgtccaagcaggaagggtgtcgcctctgcgccccattgcggaagtgtaggcccggctttggtgtggcccggcctggtacagagacatcagatgtggtgtgcaagccctgtgcaccggggacattctccaacacaacctcgtctaccgacatctgtagacctcatcagatctgtaacgtggtcgccatccctggcaacgcttctatggatgctgtgtgtacatcaacgtcgcctaccaggagcatggctccaggagcagtgcacctcccccagccagtgagtacgagatctcagcacacacagccaacgcccgagcccagcacagctccctctaccagctttttacttccaatgggcccaagcccaccggcggagggatctacaggcgatgagcccaagagctgtgacaaaactcacacttgtcctccctgccctgctcccgaactcttaggcggacctagcgttttcctgttccctcccaagcctaaggacactctgatgatatccaggacccccgaagtgacatgtgtcgtggtcgatgtgtcacacgaggatccagaagtcaagttcaattggtacgtggacggggtggaggtccataacgccaagaccaaaccccgcgaagaacagtataactccacctatcgtgtagtttcagtcttgacagtgttgcaccaagactggctcaatggtaaggagtacaagtgcaaagtgtccaacaaggctctcccagcccccatcgagaagacaatcagcaaggcaaagggccaaccgcgcgagcctcaggtgtacactctgccgcccagtagggaagagatgacaaaaaatcaggtgtccctgacttgtctcgttaaagggttttacccaagtgacattgctgtcgaatgggagtctaacggtcaaccggagaacaattataagaccacaccaccagtgttggacagcgacggttctttcttcctctattctaagcttaccgttgataagagtcggtggcaacagggaaatgttttctcctgtagcgtgatgcacgaagccctccataatcattatactcagaagagcctgtccctgtcccccggcaag

SEQ ID NO: 15537 - DNA, 1467 bp, synthetic construct
  misc_feature 1..1467: note = source = /note="Description of Artificial Sequence: Synthetic coding sequence"
  source 1..1467: mol_type = other DNA
atggcaccagtggcagtgtgggctgcccttgccgtgggtctggaactctgggcagcggcacatgcgctgccagcacaagtggcgtttactccctacgcccctgaaccgggttccacttgtagactcagggaatactacgatcagactgcacagatgtgttgctcgaagtgtagccctggccaacatgcaaaagtcttttgtaccaagacttcagataccgtgtgcgattcgtgcgaggacagcacttacactcagttgtggaactgggtgcccgagtgtctttcgtgtggatcgaggtgttcctcggaccaagtggaaacccaggcctgcactcgcgaacagaaccgcatttgtacgtgccgacctggttggtactgcgcactcagtaagcaagaaggatgtcgactctgtgcgccccttaggaagtgcaggcccggatttggagtcgcccggccaggaactgaaacctccgatgtggtctgtaaaccatgtgcccctggaaccttttcgaataccacctcgtcgactgacatttgtcgacctcaccagatttgcaatgtcgtggccattcccggcaacgcctcaatggatgccgtgtgcacttccacctcgcctactcggagcatggcacccggcgccgtccatcttccacagccagtgtcgacgagatcgcagcacactcagccaaccccagagccctccaccgcacccagcacctcgtttctcttgcctatgggacccagccctcctgcagaaggttccaccggggacgagcctaagtcgtgtgacaagactcatacctgtcctccttgtcctgcaccggagctgctgggagggccttcggtattcctcttcccaccgaaaccgaaggataccctgatgatctctcgtactccggaagtcacctgcgtggtggtggatgtcagccacgaagatccggaggtcaagtttaactggtacgtggatggtgttgaggtgcataatgctaagacgaagccacgagaagaacagtacaactcaacctacagagtcgtgagcgtgctgacggtgcttcatcaagattggctgaacggaaaggaatacaagtgtaaggtgtcgaataaggccttgcctgcaccaatcgagaaaacgattagcaaagccaaggggcagcctagagaaccacaagtgtatactcttcctccttcccgagaagaaatgaccaagaatcaagtctcgctcacctgtcttgtcaagggattttacccgtccgacattgcagtcgaatgggaatcaaatggccaacctgagaataactataagaccaccccgcccgtgcttgattcggatggatcgttttttctgtactcaaaacttaccgtcgacaagtcgcgatggcagcagggtaacgtcttttcctgctcggtgatgcacgaagcactgcataaccactacacccagaaatccctctccctttcaccaggtaaa

SEQ ID NO: 15538 - DNA, 1467 bp, synthetic construct
  misc_feature 1..1467: note = source = /note="Description of Artificial Sequence: Synthetic coding sequence"
  source 1..1467: mol_type = other DNA
atggctcctgtggctgtgtgggctgcgctagctgtgggacttgaactctgggctgccgcgcacgccctgcccgctcaggtggcattcactccttacgctccagaacctggatccacttgtaggctgagagaatactatgatcagacagcacagatgtgttgttccaaatgctctcctgggcagcacgcaaaagtgttttgcactaaaacatccgacacagtgtgtgattcttgcgaagattccacatacacacagttatggaactgggtccccgaatgtctgagttgcgggtcccggtgctcctctgaccaagttgaaacacaagcttgtacacgcgaacaaaacagaatatgtacatgtagacctggatggtactgtgcactctctaaacaggaagggtgcagattatgtgcccctcttagaaaatgccgcccaggattcggagtagccagaccagggactgaaacatctgatgtagtgtgtaagccctgtgcccccggaacattttccaatacaacaagttctacagatatctgtcgccctcaccagatctgtaacgttgtggcgatacctggaaatgcctctatggacgccgtctgcacaagtacatctcccactaggtcaatggctcctggggctgtgcatctgccccagcccgtttccactcggtcacagcatactcagccaacaccagaaccctccacagccccctcaacttcctttctcctcccaatgggacccagtccacctgcagaagggagtactggagatgaacccaaatcatgcgataaaactcatacatgccctccatgcccagcacctgaactactggggggaccctcagtttttctctttcccccaaagccgaaagatacactcatgatctcacgaacacccgaagtcacgtgtgtggtggttgacgttagtcatgaagatcccgaggtcaagtttaattggtatgttgatggggtcgaagtacataacgctaaaacaaaaccgagggaagaacagtataattccacttatcgcgtggtgtccgtgctcactgtacttcaccaggattggctcaacgggaaagagtacaaatgcaaagtgtccaataaagctctaccagcacccattgagaaaactatttctaaagccaaagggcagcctcgggaacctcaggtgtacactctgcccccttcaagagaagagatgactaaaaatcaagtttcactcacatgtctcgtgaaaggattttatccctccgatatcgccgtcgaatgggaaagtaatgggcagccagaaaacaattacaaaactactccccctgtgctggattccgatgggagtttctttttatattctaaattgacggtagacaaatctcgctggcagcaggggaatgttttttcttgctccgtgatgcacgaggctctgcacaatcattatacacagaaatccttgtcactttctcccggaaag

SEQ ID NO: 15539 - DNA, 1467 bp, synthetic construct
  misc_feature 1..1467: note = source = /note="Description of Artificial Sequence: Synthetic coding sequence"
  source 1..1467: mol_type = other DNA
atggctccggtagctgtgtgggctgctctggcagtgggtttggagttgtgggcagccgcccacgcacttccagcccaagttgctttcaccccctatgcacccgagcctggctctacgtgtaggttgcgggagtactacgaccagactgcacaaatgtgttgcagtaaatgcagccctggccagcacgcaaaagtgttctgcaccaagacctctgatactgtgtgcgacagctgcgaagactcaacctacacacagctgtggaattgggtccccgaatgcctgagttgcggctcacggtgcagcagcgaccaggtcgaaacccaggcgtgtacccgcgagcaaaaccggatttgtacctgtaggcctggctggtattgtgccctgtctaaacaggaaggctgtcggctgtgtgcaccactgcggaagtgtagacccgggttcggggttgcccgaccgggcacagaaaccagtgatgtggtttgcaagccgtgtgctcccggcactttctcaaacacaacctcttccacagacatatgtagaccgcaccagatttgtaatgtggtcgctatccccggcaatgcctccatggatgccgtctgtactagtacgtccccaacgcgatctatggcacccggcgccgtccacctgcctcaacctgtctctacccgctcacaacatacgcagccgacccccgagcccagcaccgctccttcaactagttttttactgcccatggggccctccccccctgccgaagggagtacaggcgatgaaccaaagtcttgcgacaagacccatacctgccctccttgtcctgcaccagaattgttgggtggaccctccgtctttctcttcccccctaagcctaaggacacacttatgattagcagaacccccgaggtcacctgcgttgtggtggatgtgtctcacgaggaccctgaggtcaagttcaactggtatgtggacggcgtagaggtccacaacgccaaaactaaacctagagaggaacagtataactcaacctatagggtggtctcagtactcaccgtgttacatcaggattggctcaacgggaaggaatataagtgtaaagtgagcaacaaggctctgcctgcacccatcgaaaagaccataagtaaggctaagggacagccccgggaaccgcaggtgtacacgctgccaccttcaagagaggaaatgaccaaaaaccaggtgagtttaacttgcttagtaaagggcttctatccgagtgacatcgccgtggaatgggagagcaatggtcagccagagaacaactataagacaacaccgcctgtgctcgactctgatgggtctttttttctgtactccaaactcactgtggataagagccgctggcagcagggaaacgttttcagttgtagtgttatgcatgaagctctgcataatcactatactcagaaatccttatcactgtctccaggaaaa

SEQ ID NO: 15540 - DNA, 1467 bp, synthetic construct
  misc_feature 1..1467: note = source = /note="Description of Artificial Sequence: Synthetic coding sequence"
  source 1..1467: mol_type = other DNA
atggccccagtcgccgtgtgggcagccctggcagtcggactggaactgtgggctgcagcacacgctcttcctgcgcaggttgcctttaccccttatgcacccgaacctggctcaacttgtagacttagagaatactacgaccagactgcacagatgtgttgttccaagtgttcacccggacaacatgcgaaagtgttttgtaccaagacttcggacactgtgtgcgattcctgtgaagattcgacgtatactcaactgtggaattgggtgcctgagtgtctgagctgtggttcgagatgttcctcggatcaggtggaaactcaagcatgtacccgagagcagaataggatatgtacctgtagacctgggtggtactgtgctctgtcgaaacaggaaggatgtagactgtgtgctccccttcggaagtgtagacctggatttggagtggcaagaccgggaaccgagacttccgatgtggtgtgcaagccctgtgcacccggcactttttccaatactacctcgagcaccgacatttgccgccctcatcagatctgcaatgtggtggccatccctgggaacgcctccatggatgcagtctgcactagcacttcgccaacccgctcaatggcacctggagcggtccatctgcctcagccagtgtccactcgttctcaacatacccaacctaccccagagcccagcaccgctccttctacctcgttcctgcttccgatgggtccttcaccgccagccgaaggctccacgggcgacgagcctaaatcctgtgacaaaacgcatacctgtccaccttgtcctgctcctgaactgcttggaggaccatcggtgtttcttttccccccaaagcctaaagataccctgatgattagcaggactccggaagtcacctgtgtggtggtggatgtctctcacgaagatcctgaggtgaaattcaattggtacgttgacggggtggaagtgcataacgcgaaaacgaaacccagggaagaacaatacaactcgacttaccgggtcgtgtctgtccttactgtgctccaccaagattggctgaacggcaaggaatacaaatgtaaggtttccaataaagcgctgcctgcccctattgaaaagactatttcgaaagcaaagggacagccgagagaaccccaagtgtacactcttcctccaagccgggaggaaatgaccaaaaaccaagtctcccttacttgtcttgtgaaggggttctacccttccgatattgcagttgagtgggagtcaaacggacagcctgagaataactacaagaccacgccaccagtcctggattcggatggatcgtttttcctttacagcaagttgactgtggataagtcacgttggcaacaaggtaatgtgttttcgtgcagcgtgatgcacgaagccctccataatcattacacgcaaaagtcactgtcgctcagccctggtaag

SEQ ID NO: 15541 - DNA, 1467 bp, synthetic construct
  misc_feature 1..1467: note = source = /note="Description of Artificial Sequence: Synthetic coding sequence"
  source 1..1467: mol_type = other DNA
atggccccagttgctgtctgggctgctctcgccgtcggcctggaattatgggcagccgcccacgccctaccagcccaggtggcattcactccatacgcacctgaaccgggctcgacatgccggcttcgggagtactatgatcaaaccgcccagatgtgttgctccaagtgctcgccgggccagcatgccaaggttttctgcacgaagacctcagatacggtgtgtgattcgtgtgaagactcgacgtacacccagctttggaactgggttccggagtgcctgagctgcggttcgagatgctcctcggaccaagtggagactcaggcttgtacacgcgagcagaaccggatttgcacctgccggcctggctggtactgcgcactgtcgaagcaggagggatgtagattgtgcgctcccttgcgcaagtgtcgaccaggcttcggcgttgctcgcccaggcacggagactagcgatgtcgtctgcaagccatgcgcgcccggtacgttctccaatactacgtccagtaccgacatttgccgcccccatcaaatatgtaacgtggtggccatcccgggtaacgcttcgatggatgccgtttgcaccagtaccagccctactcgatccatggccccaggggcggtgcacctaccacagcccgttagcacccgcagtcaacacacacaacccaccccggagccaagcaccgccccatccacgagttttctgttgccaatgggaccaagtccacccgccgagggcagcaccggagatgagccaaagtcttgtgacaagactcacacgtgcccaccctgcccggccccagagctgctaggcggaccgtcggtcttcttgttcccacccaaaccgaaagatactttaatgatcagccgcacgcccgaggtcacgtgcgttgttgtcgatgtgtcgcacgaggatcctgaggtcaaatttaactggtacgtggacggcgtggaggtccataacgccaaaaccaagccacgcgaggagcaatacaatagcacctatcgcgtggtctccgtactgacggtactgcaccaagactggctcaacggcaaggagtataagtgcaaagtgtcgaataaggcccttccagcaccgatagaaaagaccatatcaaaagcaaagggtcagccgcgagaaccccaagtgtatacattaccaccttcacgagaggagatgacgaagaaccaggtatcgctaacatgtctggtcaagggcttctacccatcagatatcgccgtggagtgggaatcgaacggccagccggagaacaattacaaaacgactccgccggtcttagacagcgacggctccttctttctatattcaaagctgaccgtggacaagtcgaggtggcaacagggaaacgtcttctcgtgtagcgttatgcacgaagccctgcataaccattacactcaaaagagtctgagtctgtcgccaggtaag

SEQ ID NO: 15542 - DNA, 1467 bp, synthetic construct
  misc_feature 1..1467: note = source = /note="Description of Artificial Sequence: Synthetic coding sequence"
  source 1..1467: mol_type = other DNA
atggctcccgtcgccgtgtgggctgcgctcgcagtgggcctggagctgtgggccgccgcgcacgccctgccagcacaggtggcgtttaccccgtatgcgcctgaacccggctccacgtgcaggctgcgggagtactacgatcagaccgcccagatgtgctgctctaaatgctcacccgggcagcacgccaaggtgttctgcactaaaaccagtgatacagtctgcgacagctgcgaagattcaacttatactcaactgtggaattgggtccccgaatgcctgtcatgcggtagcaggtgcagtagcgaccaggtcgaaacccaggcatgtactagggaacagaatcggatctgtacctgcagacccggttggtattgcgcactgtccaaacaggaggggtgccgattgtgcgcgccactcaggaagtgccgccctgggttcggagtggcccggccaggaaccgagactagtgatgtggtttgcaaaccctgtgcccctggaaccttctcaaataccactagttccacagacatctgccgcccgcaccaaatttgcaatgtggttgctatccctggcaacgcttccatggacgcagtctgcactagcacatcacctacacggtccatggctccaggggccgttcatctccctcagccagtgagcacgaggtcccagcatacgcagcctacccccgaaccatccactgcgccttctacgagcttcctcctgcccatggggccaagtccacccgctgagggcagcactggcgacgagcccaagagttgtgacaaaacacacacgtgtccaccttgcccagcccctgagcttctgggtggcccgagtgtcttcctcttccctcccaagccaaaagatactttgatgatctctcgaacccctgaggttacatgtgtggtcgtggacgtttcacacgaggatcctgaggtaaaattcaactggtatgtggacggcgtggaagtgcacaacgccaagactaaaccgagggaggaacaatacaactccacatatcgcgtagtttctgtgctgactgtgcttcatcaggactggctcaacggtaaggagtataagtgcaaggtatccaacaaggcactgcctgccccgattgagaagacaatcagtaaggccaaggggcagcccagagagcctcaggtttataccctccccccctccagggaagagatgacgaaaaaccaggtgtcccttacatgcttggtgaaagggttttatccaagtgatatcgcggtggaatgggagtccaatggtcaacctgagaataattataagaccaccccaccagtgctggacagtgacgggtccttttttctgtattctaaactgacagtggacaagtctcgctggcagcagggtaatgtcttttcctgcagcgtcatgcacgaggcactgcacaatcactacacccaaaagagtttgtccctgtccccaggaaaa

SEQ ID NO: 15543 - DNA, 1467 bp, synthetic construct
  misc_feature 1..1467: note = source = /note="Description of Artificial Sequence: Synthetic coding sequence"
  source 1..1467: mol_type = other DNA
atggctcccgtggctgtttgggcggctctggcagtaggcctggagctgtgggcagctgctcatgccctgcctgcccaggttgcattcaccccctatgcacctgagcccggtagtacttgtcggctacgggagtactacgatcagacagcacaaatgtgctgttcaaagtgttccccgggtcagcacgccaaagtgttctgtacaaaaacgtctgatactgtttgcgactcctgcgaggattcaacatacacccagctgtggaattgggtgcctgagtgtctgtcttgcggatctcggtgttcctcggaccaagtagagactcaggcttgtacaagggaacagaatagaatctgtacttgtcggcctggctggtactgtgcactgagcaagcaggagggttgtagactatgtgcacccctgagaaagtgtcgcccaggcttcggtgtggctagacctggcactgagacttctgatgttgtatgtaagccttgtgcccctggtacatttagcaacactaccagttctaccgacatttgccgcccacatcagatttgcaacgtggtcgcaattccaggcaacgcctcaatggacgccgtgtgcactagcactagtccgacaagatctatggcccctggcgctgtccatctaccgcagcccgtatcaacaaggagccagcatactcagcctaccccggagcccagcactgcaccgtcaacctcctttctcctccctatgggccccagcccaccagctgagggcagcaccggggacgagcccaagagttgcgataaaactcatacttgccccccctgtccggccccagaattgttgggaggaccatcagtcttcctatttccgccaaaaccaaaagacaccctcatgataagcaggacccccgaagtgacctgtgtcgttgtggacgtgtcccacgaggacccagaagtgaagtttaattggtacgtggacggcgtggaggttcacaacgccaagactaaaccacgggaggaacagtacaatagtacttatagggttgtgtccgttctgactgttctgcaccaggattggctcaacggtaaagaatataagtgtaaggtgtctaataaagcccttcccgcccctatagagaagacaatcagtaaggccaaagggcagccccgggagccacaggtgtataccctgcccccgtcccgagaggaaatgactaaaaaccaagtaagcctaacttgcttagtcaagggattttatccgagcgatatagccgtggaatgggaaagcaacggccagcctgaaaacaactataagacaactcctcccgtgctagacagtgatggttcattctttctgtatagtaagctgacagtggataaaagccgttggcagcagggcaatgtgttctcgtgtagtgtgatgcatgaagccctccacaatcactacacgcagaagtccctgagtttatctcccgggaaa

SEQ ID NO: 15544 - DNA, 1467 bp, synthetic construct
  misc_feature 1..1467: note = source = /note="Description of Artificial Sequence: Synthetic coding sequence"
  source 1..1467: mol_type = other DNA
atggctcccgtggccgtgtgggctgccctggcagtggggctcgagctttgggctgccgcccacgccttgccggcccaagtggccttcaccccatacgcacccgagcctggtagtacatgcaggctaagagaatactacgaccagacagctcagatgtgttgttctaaatgctctccagggcagcacgctaaggtcttctgcactaagacatccgataccgtctgcgacagctgtgaggattcgacctacacccagctgtggaattgggtgccggaatgcctcagttgcggatctagatgctcgtcagaccaggtggaaacccaggcgtgcacacgtgaacagaaccgcatatgtacgtgcagacctggctggtactgtgccctctctaaacaggagggctgcagattgtgcgcccctctgcgtaagtgccgccctggatttggtgtcgcaagacctgggacagagaccagcgacgtggtctgtaagccgtgcgctcctggcacctttagcaataccacttcttccacagacatatgccggccccaccagatctgcaatgtggtagcgattcccggcaatgcctctatggacgccgtatgtaccagcacttctccaacccgaagcatggcgcctggggcggtgcatctgcctcaacccgtctcaacaaggtctcagcatacccagccgacacccgaaccaagcaccgcgcccagcacttccttcctgcttcctatgggaccaagccctcctgcagagggtagcacaggggatgagcccaagagttgcgacaagacgcatacctgccctccttgtcccgcccccgagctgttagggggacctagtgtgttcttatttcctcctaaacccaaggacacactaatgatctctcgaactccagaagtaacttgtgtggtggtcgacgtttcccacgaggatcccgaggtaaaatttaactggtacgttgacggtgtggaggtgcacaacgcaaagaccaagccccgcgaggagcagtacaactcgacctatcgcgtggtgagtgtcctaacggttctccatcaggactggttaaatggtaaggagtacaaatgtaaagtgtcaaacaaggctctgccggcccccatcgagaaaaccatatccaaggccaagggacagcccagagaaccacaggtgtataccctgcccccctcaagggaggagatgaccaaaaaccaggtaagtctgacgtgcttggtgaaaggattctaccctagtgatatcgcagtagagtgggaatccaacgggcagccggagaacaactacaagacaacacctcccgtgctggactctgacgggagtttctttttgtatagcaaactgacggtggacaagtctcggtggcagcaggggaacgttttctcttgctctgtcatgcatgaggctctacataaccactacacgcagaaaagcctttctctttctccaggaaag

SEQ ID NO: 15545 - DNA, 1467 bp, synthetic construct
  misc_feature 1..1467: note = source = /note="Description of Artificial Sequence: Synthetic coding sequence"
  source 1..1467: mol_type = other DNA
atggctccagtcgccgtgtgggctgcattagccgttggtcttgagttgtgggctgcggctcatgcgttgccagcccaggtcgccttcaccccctacgcccccgagcctggctcgacatgtcgcctccgtgagtattatgaccagaccgcgcagatgtgctgtagcaagtgctcccctggtcagcatgctaaagtcttctgcaccaagacaagcgatacggtgtgtgacagctgtgaagattcaacttatacccagttgtggaactgggtgcccgaatgcctgagctgtgggtcccggtgttcctccgatcaagtggaaacccaggcttgtacaagagagcaaaaccgtatatgtacctgccgacctggatggtattgcgcattatccaagcaggaggggtgtcgtctgtgcgctcctctcaggaagtgtagacctgggttcggcgttgctaggccaggcacagaaacaagcgacgtagtgtgcaagccctgtgctccgggaacatttagcaacaccacctccagcaccgacatctgcagaccacatcagatctgcaacgtcgttgcaataccggggaatgcttcaatggacgcagtatgcacctcgacatcccccaccaggtctatggccccgggagcagtccacctgcctcaaccagtgtctacaagaagtcagcacactcagccaacacccgagcccagcacagctccgagcactagttttctgttaccgatgggcccatctccaccagccgaagggagcaccggggatgaacccaaatcttgtgacaagacccacacttgccccccctgccctgctcccgagctgcttggcggaccatcagtgttcttgttccctcccaaaccaaaggacactctgatgatttcgcgtaccccagaggtgacgtgcgtggtggtcgatgtgtcccacgaagatccagaggtgaagtttaactggtacgtggacggagtggaagtgcacaacgccaagaccaagcctagagaggaacagtataattcaacataccgggtcgtgtctgtcctcacagtactgcaccaggactggttgaacggaaaggagtacaaatgcaaggtgagcaacaaagccttgcccgcccctatcgagaagacaatcagcaaggcaaagggccagccccgggagcctcaggtctatacacttccaccatccagagaagagatgaccaaaaaccaggtatccctgacttgcctggtgaaaggcttttacccatccgatatagcggtcgagtgggaaagcaacgggcagccagagaacaactacaagacaaccccacccgtgctggattctgacggatcattttttctctattccaaattgactgtggacaaatcacgatggcagcagggcaatgtcttcagttgcagtgttatgcatgaagccctacacaaccactacacacagaagtctctgagcttgtcccccgggaaa

SEQ ID NO: 15546 - DNA, 1467 bp, synthetic construct
  misc_feature 1..1467: note = source = /note="Description of Artificial Sequence: Synthetic coding sequence"
  source 1..1467: mol_type = other DNA
atggccccggtcgcagtttgggccgccctggccgtcggattggagctgtgggcagctgcgcacgcgctgccggcgcaggtggcgttcactccgtacgcccctgagcctggatcgacttgcagattgcgggaatactacgaccaaactgcccagatgtgctgctctaagtgttcaccaggacaacacgctaaggtgttctgcactaaaactagcgacaccgtgtgcgactcctgcgaggactcaacctacacccagctttggaactgggtgccagaatgtctgtcctgcggatcccgctgctccagcgaccaggtggaaactcaggcctgcactcgcgaacagaacagaatctgcacgtgccgacccggttggtattgcgcactgtcaaagcaggaaggatgtcgcctctgtgcgccgctcaggaagtgccgcccgggcttcggggtcgcacgcccgggaaccgaaactagcgatgtggtctgcaagccatgtgcacctgggaccttttcgaataccacttcgagcactgacatctgccgccctcatcagatctgcaacgtcgtcgccatccctggtaacgcttccatggatgctgtgtgtacttctacctccccgactcggtccatggcccccggagctgttcacctgccgcagccagtaagcacgcggtcgcagcacacccagcctactccggagccgtctactgcgccatctaccagcttcctgctcccgatggggccatcgccacccgccgaagggtcaactggcgacgagcctaagtcatgcgataagacccacacctgcccgccttgccctgccccggagctcctgggcggaccatcggtgttcctgttcccgcctaagccgaaagacactcttatgatctcccggaccccggaggtcacttgcgtggtcgtcgacgtctcacacgaggatccggaagtgaaattcaattggtacgttgatggagtggaagtgcacaacgcaaagaccaagccgcgggaagagcagtacaactcaacttatcgtgtggtgtccgtgctcaccgtcctgcatcaagactggctgaacggaaaagagtataagtgcaaagtcagcaacaaggccttgcctgcgccgatcgagaaaactatttcgaaggcaaagggtcaaccgcgcgaaccgcaagtctacaccctgccgccctcgcgtgaagagatgactaaaaatcaagtgtccttgacctgcctcgtgaagggattctacccaagcgatatcgcagtcgaatgggaatccaatggacagcctgagaacaattacaagaccactccgccagtgttggattcagacgggtcgttctttctgtactcaaagttgactgtggataagtccagatggcagcaaggaaacgtcttcagctgctcggtgatgcacgaggccttgcataaccactatacccaaaaaagcctgtcactttcgccgggaaag

SEQ ID NO: 15547 - DNA, 1467 bp, synthetic construct
  misc_feature 1..1467: note = source = /note="Description of Artificial Sequence: Synthetic coding sequence"
  source 1..1467: mol_type = other DNA
atggctcccgtcgccgtctgggctgcactggcagtcggactggagttgtgggcagctgctcacgctctgcccgcacaagtagcattcaccccatacgcaccagagccaggttccacttgccgtttgagagagtactacgatcaaactgcccagatgtgttgctcaaaatgtagtcctggtcaacacgctaaggtgttttgcacaaagacatccgacacagtttgtgacagctgcgaggacagcacatatacccaactttggaactgggtgcctgaatgcttgagttgcggcagtcgttgttcttccgaccaggtggagacacaagcatgcactagggagcagaaccgtatctgtacttgcaggcccggttggtactgcgccctgagcaagcaagagggctgccgcctgtgtgcccccctgagaaagtgtagacccggcttcggagttgctcgtccaggaaccgagactagcgatgtcgtatgtaaaccttgtgctcctggcactttctcaaacactacatccagtacagacatctgcaggccacatcaaatttgcaacgtcgttgccattcctggaaacgcatccatggacgccgtctgcaccagcacttcacccaccagaagtatggcccctggcgctgtgcacttgcctcagcctgtgtcaacacgctcccagcacacacagcccacaccagagccaagcaccgcccctagtacctctttcttgctcccaatgggcccctctccacctgccgaaggatccacaggtgatgaacccaagagttgcgacaaaacacacacatgtcccccatgtccagctccagaactccttggaggaccctctgtattcctgtttccacccaagcccaaggataccctcatgatatccaggacccctgaagtcacctgcgtggtggtagatgtgtcccacgaggaccctgaagtcaagtttaactggtacgtggatggagtcgaggtgcacaacgctaagacaaaacctagagaggagcaatataatagcacatatcgcgtggtttccgtcctcaccgtgctgcatcaggattggctcaatggcaaggagtacaagtgtaaggtttccaacaaggctcttcccgcccctatcgagaagaccatttctaaagccaagggacaacccagggagccacaggtatacactctgccacccagccgtgaggagatgactaaaaatcaggtgagtctgacctgtctcgtgaaaggcttttatccctccgatatcgcagtcgaatgggagagtaatggacagccagaaaataactataaaaccaccccccccgtgctcgactctgacggttcttttttcctgtatagcaagctcacagtggataagtccagatggcaacagggaaatgtgttctcttgctcagttatgcacgaagcacttcacaaccactacacacaaaagtcactgagcctgagtcctggcaag

SEQ ID NO: 15548 - DNA, 1467 bp, synthetic construct
  misc_feature 1..1467: note = source = /note="Description of Artificial Sequence: Synthetic coding sequence"
  source 1..1467: mol_type = other DNA
atggccccagtggccgtgtgggctgccctagccgttggcctggagctctgggccgctgcacatgctcttccagctcaagtggctttcactccttatgcccccgagcccggaagtacctgccgtttacgcgaatattacgatcagactgcacagatgtgttgttctaagtgctccccaggccagcatgctaaagtgttctgcacaaagaccagcgatacagtctgcgactcttgcgaggacagtacctatacccagctgtggaattgggttcccgagtgtctgtcatgtggatcaaggtgttcctccgatcaagttgaaacccaggcctgcacacgagagcaaaacaggatttgtacctgcaggcccggctggtactgcgccttaagcaagcaggaaggctgtcggctgtgcgccccactgcgtaagtgcaggccaggcttcggcgtggctcgtcccggaacagagacatctgacgttgtctgtaaaccttgtgcaccaggcacatttagcaacaccaccagctccaccgacatatgtcgcccacaccagatttgtaatgtggtagccatacctggcaacgctagcatggatgccgtgtgtacctcaaccagccctacacggtcaatggcaccgggtgctgtgcatctccctcaaccagtgagcacacggagtcagcatacacagcctacaccagagccttctactgcccctagcaccagtttcctgttgccaatgggacccagcccccccgccgagggctcaactggcgacgaaccaaagtcctgcgacaagactcatacttgcccaccctgtccggctcccgaactactggggggccccagcgtgtttctgttcccaccgaagccaaaagataccttgatgatttccaggacccccgaggtgacatgcgtggttgtcgatgtgagtcacgaggaccctgaggtgaagtttaactggtacgtggacggggtcgaagttcacaacgctaaaaccaagccaagggaagaacaatataattctacttatcgggttgtttccgtgttgactgtgctgcatcaggactggctgaatggcaaagagtataaatgcaaagtgtccaataaggccctgccagctcctattgaaaagaccatatcaaaggctaaaggacagccacgggaaccccaggtgtacaccttaccaccatcccgggaggagatgaccaagaatcaggtctctctgacatgtctggttaagggtttctatccatcagatatagcagttgaatgggagagcaatgggcaaccagagaacaactataaaaccacccccccagtcctggattctgatggctctttctttctgtactctaaactgactgtggataagtctagatggcagcagggaaacgtgttcagctgctctgtcatgcacgaggccctgcacaatcattatacacagaaatctctatccttgtcccccggaaag

SEQ ID NO: 15549 - DNA, 1467 bp, synthetic construct
  misc_feature 1..1467: note = source = /note="Description of Artificial Sequence: Synthetic coding sequence"
  source 1..1467: mol_type = other DNA
atggcacccgtggcagtctgggcggcattggctgttggactggagctgtgggctgctgcccacgccctgcccgctcaagtggctttcactccctatgcccccgaaccaggctctacctgtcggctaagggagtactatgaccaaaccgctcagatgtgttgttcaaagtgttcccctgggcaacacgcaaaagtattttgtaccaaaacatctgacacagtgtgtgattcatgcgaagactccacatacacccaactttggaactgggtgcctgagtgtctgtcatgcggatccaggtgcagttctgaccaggtggaaacacaagcttgcacgcgcgaacaaaatagaatttgtacctgtcggcctggttggtattgtgcgctgagcaagcaagagggctgtcgcctttgcgcccccttgcggaaatgccgcccaggtttcggagttgcacgaccaggaacagagaccagcgacgtcgtttgtaagccctgtgcccctggaacttttagcaacactacctcgagcaccgacatctgcaggcctcaccagatctgtaacgtcgtcgcaatccccgggaatgctagtatggacgctgtgtgcaccagtacatctcctacacgatccatggcaccaggagccgtccacctgcctcagccagtaagtactaggagccagcacacgcagcctaccccagagccttccacagccccttccacctcattcctcctgccaatgggcccttccccaccagcggaaggttctacaggagacgagccaaagtcttgtgacaagacccacacatgtccgccctgccctgctccagagctactggggggcccatctgtcttcctgttcccgcccaaacccaaggacaccctgatgataagcaggacccctgaggtcacatgtgtggttgtggacgtttcacacgaggaccctgaagtgaagtttaattggtacgtcgatggggtcgaggtgcacaacgctaagacaaagcctagagaggaacagtacaattctacataccgcgtggtttctgtgttgactgtgttgcatcaggactggctcaatggaaaagagtacaaatgcaaggtctccaataaagctttgcctgctccaattgaaaagacaatcagcaaagccaaggggcagcccagggagcctcaagtgtatacccttccgccgtcccgggaagagatgaccaaaaaccaggtgtcactgacctgtctggtcaagggcttctatccatcagacattgccgttgagtgggagtccaacggccaacccgaaaacaactataaaacaactcctcccgttcttgactcggacggatctttcttcttgtacagcaagctgacagtagataaatcacgctggcaacagggaaatgttttcagttgttccgttatgcatgaggctctacacaatcactacacacaaaagtccctgtccctgagccctggaaag

SEQ ID NO: 15550 - DNA, 1467 bp, synthetic construct
  misc_feature 1..1467: note = source = /note="Description of Artificial Sequence: Synthetic coding sequence"
  source 1..1467: mol_type = other DNA
atggccccagtggccgtctgggcagcactcgccgtagggctcgagctatgggccgcagctcatgctctgcctgcccaggtggctttcactccgtacgcccccgaaccaggatctacttgtcgcctgcgagagtactatgatcagacagcccagatgtgctgcagcaaatgttcgcccggacagcatgcaaaagtgttttgcacgaaaacctcagacacagtatgcgattcttgcgaagactctacctatacccagctttggaattgggtccccgagtgcctgtcatgtgggtccagatgcagttcagatcaggtggagacacaagcgtgcaccagggaacagaacagaatctgtacttgcaggcctggctggtattgcgccctctcaaagcaggaaggctgccgactctgcgcgcccttaaggaaatgcaggcccggattcggcgtggcccggcccggaactgaaacttccgacgtggtttgcaaaccctgcgccccagggacgttttccaacactacctccagcaccgacatctgccggccccaccaaatatgtaacgtagtggccatcccgggaaacgcgtcaatggacgctgtgtgcacaagtaccagccctactcgctctatggctcctggagccgttcatctgcctcaacccgtctccaccaggtctcagcacacccagccaacccccgaaccttcaactgcgccatcgacgagtttcttattgcccatgggcccctctcccccggctgagggctccacaggagatgagcccaaatcctgtgacaagacgcatacttgtcctccttgtccggcccccgagctgttaggcggcccgtcagtttttttgttccctccgaagcccaaagacacactgatgattagtcggacccctgaggtgacatgcgtggtggtagacgtttcccacgaggatcctgaggtgaagttcaattggtatgtggatggcgtcgaggttcacaatgcaaagacaaaacccagggaggagcagtacaatagtacgtatagggtggtgtcagtcctgacagtgttgcaccaagattggctgaatggaaaggagtataaatgtaaggtcagcaacaaagccctgcctgcccccattgaaaagacgatttcgaaagcgaaaggccagcccagagagccacaggtgtacaccttgcccccgtcgcgtgaagaaatgaccaagaatcaggtcagcctgacctgtttggttaagggcttttaccctagtgacatcgctgtggaatgggagtcaaacgggcagcccgaaaacaattacaagactacccctccggtattagattcggatggcagctttttcctttatagtaagctgaccgtagacaagtcgaggtggcagcagggcaacgtcttcagttgtagcgtgatgcacgaggccctgcataaccactatacccaaaagtctctgagcctaagtccaggaaag

SEQ ID NO: 15551 - DNA, 1467 bp, synthetic construct
  misc_feature 1..1467: note = source = /note="Description of Artificial Sequence: Synthetic coding sequence"
  source 1..1467: mol_type = other DNA
atggctcccgtggctgtgtgggccgcacttgcggtggggttggaactctgggctgccgctcatgccctgcctgcccaggtagcatttactccctatgccccggagcccggatcaacatgtagattaagagagtactatgaccagaccgcacagatgtgttgttctaagtgctcgcctggacagcacgcaaaagttttttgtacaaaaacatcagatacagtgtgtgacagctgtgaagacagcacttacacccagttatggaattgggtcccggaatgtctgagctgcggcagccgatgcagcagtgatcaggtagaaacccaggcgtgcactagagaacagaataggatttgcacttgcagacctggctggtactgcgccctatctaaacaagaaggttgcaggctctgtgcccctctccgaaagtgcaggccaggatttggggtcgccagacctggcacagaaacctccgatgttgtgtgtaagccctgcgctcccgggacatttagtaacacaactagctctaccgacatttgtagaccccaccagatatgcaatgtggtggccatacccggcaatgcctccatggatgctgtctgcacctcaactagcccgacacggagcatggcccctggggcggtgcatctgccccagcccgtatctacccgaagtcagcacactcaacctacaccagagcctagcaccgcgccctcaaccagttttctgctgcctatgggccccagtcccccagccgaaggcagcaccggggacgagcctaaaagctgcgataagactcatacctgtcctccatgcccagctccagagctgctggggggcccttccgtttttttgtttccgccaaagcctaaggacacgctgatgatctcacgaactcctgaagtcacatgtgtagtggtcgacgtctctcacgaagaccccgaggtgaagtttaactggtacgtggatggcgtggaagttcacaatgcgaagactaaaccccgagaggagcagtataactcaacctatcgagtggtaagcgtactgacggtcttgcaccaggactggcttaacggtaaggagtataaatgcaaggtgtccaataaggccctgcccgcacctatcgagaagactatttccaaggcgaagggtcagcccagagagccacaggtgtacacactccccccaagtagggaggaaatgaccaaaaaccaggtgagtttaacctgcctagttaaaggtttctacccaagtgatatagctgtggagtgggagtccaacggtcagccggagaataattataaaactactcctcccgtgctcgactcagacggctctttctttctgtacagtaagctgacagtggataagtcaagatggcaacagggcaatgtgttcagttgttccgtcatgcacgaagcacttcataaccactatacccagaagtccctgtctctttctcctggtaaa

SEQ ID NO: 15552 - DNA, 1467 bp, synthetic construct
  misc_feature 1..1467: note = source = /note="Description of Artificial Sequence: Synthetic coding sequence"
  source 1..1467: mol_type = other DNA
atggcccctgtggccgtgtgggccgctctagcagtgggcttagagctctgggcagccgcgcatgccctccctgctcaagtcgcctttacaccctatgcgccagagcctggctccacctgtcgccttagggagtattacgaccagaccgcgcaaatgtgctgtagtaaatgtagtccagggcaacatgccaaggtcttttgcacgaaaacatctgataccgtgtgtgattcttgtgaggacagcacctatacccagctgtggaactgggttcccgagtgtctctcatgcggcagcagatgttcgagcgatcaggtagagacacaggcctgcacacgcgagcagaacagaatatgtacctgcagacccggttggtactgcgcactgagcaagcaggaaggttgccggctctgcgcccccctccgcaagtgcaggcccggttttggcgtagctaggcctggaaccgaaacatctgacgttgtgtgcaagccttgcgccccgggcacctttagcaacactacaagctccacggacatctgtcgaccccaccagatctgtaacgtggtggcaattcctggcaacgcctccatggatgcagtctgcacatcgacatcgccaacccgatctatggcccccggggccgtacacctacctcagcctgtgtccacacgcagccagcatacacagccaacacctgagccctccacagctcccagtactagctttctcctgcctatgggcccgagcccaccagcagagggaagcactggagatgagccaaagtcctgcgataaaactcatacctgtcctccctgtcccgccccagaactactagggggcccctcagttttcctgttcccacctaagccaaaggacacacttatgatatcacgcactccagaagtgacatgcgtggtggtggacgtcagtcacgaggaccctgaagtgaagtttaattggtacgtggacggagtcgaagtgcacaatgcaaagaccaaacctagagaggagcaatataactctacatatagggtggtgtccgtgctgactgtcctgcatcaagattggctaaatgggaaagagtataagtgtaaggtgtcaaataaggccctgcccgcaccgattgaaaaaacaatatctaaggccaaggggcaacctcgtgagcctcaggtttacacgctgcctccaagcagagaggagatgaccaaaaaccaagtcagcctgacttgccttgtaaagggcttttacccaagtgacattgcggttgaatgggaatctaacggccagccagagaataattacaaaaccaccccgcctgttcttgacagcgatgggtcttttttcctatattcaaagcttacagtggacaagagtcgctggcaacaagggaatgtattcagctgcagcgtcatgcatgaggccttacataatcactacacccagaaaagcctgagtctctcccccgggaag

SEQ ID NO: 15553 - DNA, 1467 bp, synthetic construct
  misc_feature 1..1467: note = source = /note="Description of Artificial Sequence: Synthetic coding sequence"
  source 1..1467: mol_type = other DNA
atggctccggtggcggtgtgggcagcgcttgctgtcggactggagttatgggccgccgcacatgcgctgcctgcacaagtcgcatttacaccgtacgcgccggagcctgggagcacgtgtcggttaagagaatattacgaccaaactgcacagatgtgctgttctaagtgttcaccgggtcagcatgcgaaagtattttgcactaaaacatcagacacggtttgcgactcctgtgaagactctacatatactcaactgtggaattgggtccctgaatgcttgtcttgtgggtcccgttgctcgtcagatcaggtcgagacacaggcctgtacaagggaacagaatagaatctgcacgtgcagaccgggatggtattgcgcgttatcaaaacaggaaggatgccgcctgtgtgcgcctttaagaaagtgccgaccgggatttggggttgcccgcccgggaacggaaacatccgatgttgtctgcaagccttgcgcccctggcacattttctaatactacgagttccactgatatctgccgtcctcatcaaatctgtaacgtcgttgctatcccaggaaacgcgtcgatggatgccgtgtgtacttctacgtcacctacccgctctatggcgcctggagcggtgcatttgcctcaacctgtgagcaccaggagccaacatacacaaccgactccagaaccttcgacagcgccctcgacatctttcttgttaccgatgggccctagtccacccgctgaaggatcaacaggcgacgagccgaaatcgtgcgacaaaacacatacatgtccgccgtgtccagctccggaactgctaggaggtccaagtgtatttctttttccgcctaagcccaaggataccctgatgattagcaggaccccagaagtcacttgcgtcgtcgtggatgtgtcccatgaagatcctgaagtcaaatttaattggtacgtcgatggcgtggaagtccacaacgctaaaacaaagccaagggaagaacaatataactcaacttatcgcgtggtatctgtgctgaccgttctccatcaagattggcttaacgggaaagagtacaagtgcaaagtttcgaataaggcactgccggcaccgattgaaaaaacaatatcaaaggcaaaaggtcagcctcgggaacctcaagtctatacgttaccgccctcccgagaagaaatgacgaaaaatcaagtttctcttacttgcttagtgaagggtttttatccgtcagatatcgctgtagagtgggaatcaaacggccagcctgaaaacaactataaaactacgccgccagtcttggatagcgatgggtctttttttctgtatagtaaacttaccgtagataagtcgcggtggcagcaaggtaatgttttctcttgttcagtcatgcacgaggcactgcataaccattatacgcagaaaagcctatctctgagtccgggcaaa

SEQ ID NO: 15554 - DNA, 1467 bp, synthetic construct
  misc_feature 1..1467: note = source = /note="Description of Artificial Sequence: Synthetic coding sequence"
  source 1..1467: mol_type = other DNA
atggcgcctgttgccgtttgggccgcactcgccgtgggcctggaactgtgggccgctgctcatgccctcccagctcaggtggcattcacaccttatgcccctgagccggggagtacctgccgcctgcgggaatactatgatcagaccgcgcagatgtgctgctccaagtgttcccccggccagcacgccaaggttttttgtacaaagacctccgataccgtgtgcgacagttgtgaagattctacttacactcagctctggaattgggtgccagaatgtctgtcatgcgggtcacgctgcagcagtgatcaagtggagactcaggcatgtacccgcgaacaaaaccgtatttgtacatgtcgacccgggtggtactgcgccctgtccaaacaggaggggtgcagactgtgcgccccacttagaaagtgcagaccgggatttggcgttgctcggcccggaacggaaacatcagacgtggtgtgcaagccatgtgctcctggaacttttagcaatacaacttcttcaacggacatctgtcgaccccaccaaatctgtaatgtagtggccatcccggggaacgctagcatggacgcagtttgcacctctacttcaccaaccagaagtatggcacctggtgcagtccatttaccacagccggtctccacacggagccagcacacccagcctacaccagagccatccaccgcaccgtcgacatcgttcttactacccatgggtccttccccaccagctgaagggtctacgggggacgaaccgaagtcctgtgataagactcacacatgtccaccttgccctgctcctgagctcctcggagggccgtcagtgtttctgttcccccctaagccaaaagacactctgatgattagccgaacacctgaagtgacctgtgtggtggtcgacgtctcacacgaggaccctgaggtgaaatttaattggtatgttgacggagtggaagtgcacaatgcaaaaacgaaaccaagggaagagcagtataattctacctatagggttgttagcgtcttgactgtgttacaccaggactggctgaacgggaaggaatataaatgtaaagtcagtaacaaggctctccccgcacccatcgagaaaaccatatcaaaggcaaaaggccaaccgcgcgaaccccaggtctacaccctgcctccgtcgcgggaggaaatgacaaaaaaccaggtgagtctgacctgcctggttaagggattctacccctctgatatcgcagttgagtgggagtccaatggccagcccgagaataattataaaactacacctcccgtcttggattctgacggtagcttctttctgtattcaaagttgacggtagacaagtctagatggcaacaaggcaatgtcttttcctgctccgtcatgcatgaggcgctccataatcattacacccagaagagtttatcactttctcctggaaag

SEQ ID NO: 15555 - DNA, 1467 bp, synthetic construct
  misc_feature 1..1467: note = source = /note="Description of Artificial Sequence: Synthetic coding sequence"
  source 1..1467: mol_type = other DNA
atggcaccggtcgctgtttgggccgccctggcggtgggactggagctgtgggcagcagcacatgcactccctgctcaggttgctttcaccccgtacgctccggaaccgggctccacctgccggctgagagaatactacgaccaaaccgcacagatgtgctgctcgaagtgctcaccgggacagcatgccaaggtgttctgtacgaaaacctcggacactgtgtgtgattcgtgcgaggactcgacctacacccaactgtggaactgggtgccggaatgcctgagctgcggtagccggtgctcgtcggaccaagttgagactcaagcgtgtactcgcgaacagaaccgcatctgcacgtgccgcccgggatggtactgcgctctcagcaagcaggagggatgccggctttgcgccccactccgtaaatgccgccctggctttggcgttgctcgccctggtaccgagacttccgatgtcgtgtgtaaaccgtgcgccccaggaactttctccaacactacctcctctactgacatctgccgcccccaccagatctgtaacgtggtcgccatccccggcaacgcgtccatggatgctgtgtgcacctccacgtccccaactcgctccatggccccgggtgccgtccatctgcctcaaccggtgtcaactagatcgcaacatacgcagcctaccccggaaccatcgactgccccatcgaccagcttcttgctgccaatgggaccttcgccgccggcagaagggagcacgggcgatgagccaaagtcctgcgacaaaacccatacttgcccaccttgcccagcgccagaactgctcggcggacccagcgtctttctttttccgccgaagccaaaagataccttgatgatcagccgcacgcctgaggtgacctgcgtcgtggtcgacgtctcccatgaagatccggaagtgaagtttaactggtacgtggacggagtggaagtgcacaacgctaagaccaaacctagggaagaacagtataactcaacgtaccgcgttgtctcagtacttaccgtgttgcaccaagattggttgaatggaaaggagtacaagtgcaaagtctctaacaaggcactgccggcgccaatcgaaaagacgatctcaaaagccaagggtcagccaagagagccgcaagtctatacgctgccgccatcacgggaagaaatgactaagaaccaagtgtctctgacctgcctggtgaaaggattctacccatcagacatcgcagtggagtgggaatcgaatggccagccggaaaacaactacaagaccactccgccggtgctcgactcggatggttctttcttcctgtactcgaagctgaccgtggacaaaagccggtggcagcagggaaatgtgttctcctgctcagtcatgcacgaggccctgcacaaccactacacccagaaatccctgtcactctcaccagggaag

SEQ ID NO: 15556 - DNA, 1467 bp, synthetic construct
  misc_feature 1..1467: note = source = /note="Description of Artificial Sequence: Synthetic coding sequence"
  source 1..1467: mol_type = other DNA
atggcacctgtggcagtctgggccgctcttgccgtgggccttgagctttgggcggccgcacacgcactcccagcccaagtggcctttaccccttacgcaccggagccgggttctacttgtcgacttcgggagtactatgaccagaccgcccaaatgtgttgtagtaagtgtagccctggtcagcacgctaaggtgttttgcaccaagacctccgatactgtgtgtgacagctgcgaagatagcacgtacacccagctttggaattgggtgcctgaatgcctctcctgtggctccaggtgttcgagcgaccaggtggaaactcaggcgtgcactcgggaacaaaacagaatctgtacttgtcgcccaggttggtattgtgcactgtcgaaacaggaaggctgtcgattgtgtgcaccactgcggaaatgtcgccccggattcggtgtggcaaggccaggaaccgagacttcagacgttgtatgtaagccttgtgcgcctggtactttctcgaacactacgtccagtactgatatatgccgcccccatcaaatttgcaacgtcgtggcaatccctgggaacgcatctatggatgcggtctgcacgtcgacgtcccctaccagaagcatggcaccaggagcagtgcatctgccacaacccgtgtcaacccgtagccaacacacccaacccactccggaaccaagcactgcaccttcaacctcgttccttctccctatgggcccatcccctcctgcagaggggtcaaccggggatgagcccaagtcctgtgataaaactcatacctgtcctccctgccctgcgcccgaattgctgggagggccatcagtgtttttgtttccccctaagccaaaagacacgctgatgatttcgaggacccctgaggtcacgtgcgtggtggtcgatgtgtcacatgaggatccagaagtaaagttcaattggtacgtagatggtgtggaagttcataatgcaaagactaagccccgcgaagaacagtacaactcgacctacagagttgtgtctgtgctgactgtcctccaccaggattggctgaacggcaaggaatacaaatgcaaggtgagcaataaggcacttccagctcccatcgaaaaaactatttcgaaagcaaaggggcaacctcgagaaccccaagtctacacccttccgccttcacgggaagagatgactaagaaccaagtgtccctgacctgtctggtcaaaggattttacccttcggacattgccgtggaatgggagtcgaacggacaaccggagaataactacaagaccaccccgcccgtcctcgactccgacggatcatttttcctgtactccaagctcactgtggataaaagcagatggcagcaagggaacgtctttagctgcagcgtcatgcacgaagccctgcataatcattacacccagaagtcccttagcctgtcgcccggaaag

SEQ ID NO: 15557 - DNA, 1467 bp, synthetic construct
  misc_feature 1..1467: note = source = /note="Description of Artificial Sequence: Synthetic coding sequence"
  source 1..1467: mol_type = other DNA
atggcccccgtcgccgtgtgggcagccctggcggtgggactcgagctgtgggctgcagctcacgccctccccgcccaggtggcatttacgccctacgcccccgagcccggctcaacgtgtcgactgcgggagtattatgatcagaccgctcagatgtgctgctccaaatgctcccccggccagcacgccaaggtgttctgcacaaagacaagtgacactgtgtgtgactcttgtgaggactcaacgtacacgcagctgtggaactgggttcccgagtgcttgtcttgtgggtctcggtgtagtagtgaccaggtagagacccaggcatgtactagggagcaaaaccgcatttgtacctgcaggccaggttggtactgtgccctgagcaagcaggaaggctgcagactctgtgcccctctgcggaagtgccgaccaggatttggtgtggcaagaccgggaacggaaacaagtgacgtcgtgtgcaaaccttgcgccccgggcacattctctaatactactagctctactgacatatgtaggccgcaccagatctgtaacgtggtggccatcccgggcaatgcaagcatggatgccgtgtgtaccagtactagccccacgcgctccatggccccaggggccgtgcacctcccacagcccgtttccacacgaagccagcatacacaaccgacacccgagcccagcactgccccttccacatctttcctcttgccaatgggccccagtcccccagctgagggttctactggtgatgagcctaagagctgtgacaaaacacacacatgcccgccttgccccgcccctgagctcctgggaggtccatcagtattcctgttcccaccaaaacccaaggacacgctcatgatcagcagaacgcccgaggtcacctgcgtggttgttgacgtgagccatgaggaccctgaagtcaagtttaattggtatgtggacggagtggaagtgcacaacgcgaagactaaaccacgggaagagcagtacaacagtacctaccgcgtggtgtccgtgctgactgtattgcaccaggactggctgaacggtaaggagtacaagtgtaaggtaagcaacaaggccctccctgcaccgatagagaaaactatttcaaaggcgaaaggacaacccagagagccacaagtgtatacgctgccacccagtagggaggagatgaccaaaaaccaagtgtccttgacctgcctcgttaaggggttttatccttccgacattgctgtggagtgggagtctaatgggcaacctgagaacaactataagactacgccacctgtgctcgacagtgatggatcttttttcctgtacagtaagctgacagtcgacaaaagtagatggcagcaaggtaatgtcttctcctgcagtgttatgcatgaagcgctgcataaccactatacccagaagtccctgtctttgagccctgggaaa

SEQ ID NO: 15558 - DNA, 1467 bp, synthetic construct
  misc_feature 1..1467: note = source = /note="Description of Artificial Sequence: Synthetic coding sequence"
  source 1..1467: mol_type = other DNA
atggcacccgtcgccgtctgggcagcactcgcagttgggctggaactgtgggcagcagcccatgcactccctgcacaggtggcatttaccccctacgcgcctgaacccggatcaacttgtaggctccgggagtactacgatcaaaccgcacagatgtgttgtagcaaatgttcaccagggcagcatgcaaaggtgttctgcaccaaaaccagcgatactgtgtgtgattcgtgtgaggattccacttacacccagctttggaactgggtgccagagtgtctgtcgtgtggatcgcgttgttcatcggatcaagtggaaactcaagcgtgcacccgcgaacagaaccggatttgcacgtgccggccagggtggtactgtgcactttcgaagcaggaaggatgtaggctttgcgcccctctgcgcaagtgtcggcctgggtttggagtggcccggccaggaaccgaaacctcggatgtagtctgcaagccttgtgcacctggaacgtttagcaacactacttcctcgaccgacatatgcagaccacaccaaatttgcaacgtggtggctatccctgggaatgcaagcatggatgcagtgtgtactagcacttcgccaactcgcagcatggcccctggagccgtccacctgccacaacccgtgagcacgagatcgcaacatacccagcctacccctgagccgtcgaccgccccatcgacctccttcctgctgcctatgggtccgtctccccctgcagaaggttccactggagacgaaccaaagtcgtgtgataagacccacacctgccccccttgtcccgcacctgaacttcttgggggcccatcggtgttcctttttccacctaagcctaaagatactcttatgattagcagaacccccgaagtcacttgtgtcgtcgtggatgtgtcacatgaggatccggaagtgaagttcaactggtacgtggatggtgtggaagtgcataatgcaaaaactaaacctagagaggagcagtacaactccacctaccgggtggtttcggtgcttaccgtcctgcatcaagattggctcaatggaaaggaatacaagtgcaaggtgtccaacaaagcactgccagcgcccatcgaaaaaactatttcaaaggcaaagggacaaccgcgcgagccacaagtctacaccctcccaccatcgagagaggaaatgactaagaaccaagtcagtcttacttgtctggtcaaggggttttacccttccgacatcgcagtggaatgggaatcaaacggacaaccagaaaacaactacaagactactcctcccgtactcgattccgacggatccttctttctgtactccaagctcaccgtggacaagtccagatggcaacagggaaatgtgttcagctgctccgtgatgcatgaagcccttcataaccactatactcaaaagtcactcagcctgtcacctggaaaa

SEQ ID NO: 15559 - DNA, 1467 bp, synthetic construct
  misc_feature 1..1467: note = source = /note="Description of Artificial Sequence: Synthetic coding sequence"
  source 1..1467: mol_type = other DNA
atggcacctgttgcagtctgggctgccttggctgtaggactagagctttgggccgcagctcatgcccttccagcacaggttgcatttacaccctatgccccagagccaggatcaacgtgcagacttcgtgagtactacgatcagactgcacaaatgtgttgttctaagtgtagtccagggcagcatgctaaggttttttgtactaaaactagcgatactgtgtgcgatagttgtgaagactcaacttatactcaactgtggaactgggttccagagtgcctatcttgcggctcaagatgctctagtgaccaagtggagacccaggcttgcactcgtgagcagaacaggatctgcacctgtcgtccgggctggtactgcgctctgagtaagcaagagggttgtcgtttatgcgcgccattacgcaagtgtaggcctggatttggtgttgcaaggcctggtactgagacgtcagatgtcgtgtgcaaaccttgtgctcctggaacattcagtaatacaacatcttctacggatatatgtagacctcaccaaatatgcaatgttgtagctattcccgggaacgctagcatggatgctgtttgcacaagtacaagtcccacacgttctatggcaccaggggccgttcatctcccgcaaccagtttcaactaggtcccaacacacccagcccactccagaaccgtcaaccgctccttctacctcctttctacttcctatgggcccctcccctcccgccgagggttccacaggtgatgagcctaagtcttgtgataagacccatacttgcccgccctgtccagcccctgagcttttgggtggaccttcggttttcttgttccctcccaagcccaaggacaccctaatgatttcaaggacaccagaagttacatgtgttgttgtggatgtgtcccacgaagatcccgaagttaaatttaactggtatgtggatggagtggaggttcacaacgcaaaaacaaagcctcgagaagaacaatataattctacctatcgtgtcgtgtctgtgctgactgtgcttcatcaggattggcttaatggcaaagaatacaagtgcaaagtgtcaaacaaggcactcccagcgccaattgaaaagacaatctctaaggcaaaaggccagcctcgagagccacaagtgtatacgctaccacccagtagagaggaaatgaccaaaaatcaagtctcccttacctgcctagtcaaaggattctatccgtcagatatagctgtggagtgggagtcaaacggacagccagaaaataattacaagaccacaccaccagttctcgattcagacggttccttcttcttgtactcaaaacttacagtggataagtcccgatggcaacagggaaacgtgttcagttgcagtgttatgcacgaggcacttcataatcattacacccaaaagagtctcagtcttagccctggtaaa

SEQ ID NO: 15560 - DNA, 1467 bp, synthetic construct
  misc_feature 1..1467: note = source = /note="Description of Artificial Sequence: Synthetic coding sequence"
  source 1..1467: mol_type = other DNA
atggccccggtggccgtctgggccgcgttggccgtgggactcgaactgtgggcagcggcacacgccctgccggcgcaggtggccttcactccttacgctccagagcccggttccacctgcaggctgcgcgaatactacgaccagactgcccagatgtgttgctcgaagtgctctcctggacaacatgccaaggtgttttgcactaagacttccgatactgtctgtgattcctgcgaggactcgacgtatactcagctgtggaactgggttcctgaatgccttagctgcggatcgagatgctcgtcagaccaggtggagactcaggcctgcacccgcgaacagaatcggatttgcacgtgccgcccaggctggtactgtgcgctttcgaagcaagaaggttgtcgcctctgcgcaccgcttaggaaatgcagaccgggatttggcgtggctcgcccgggcaccgagacgtcagacgtggtgtgcaagccatgcgcaccaggtacgttttcgaacaccacttcatctaccgacatctgcagaccgcaccagatctgtaacgtagttgccatccctggtaatgcatctatggacgctgtgtgcacgtccacgtcccccacccgctcgatggcgccaggagcagtgcatctgcctcaacctgtgtcgactcggtcccagcacactcagccaactcctgaaccatccaccgcaccaagcacttccttcctgctgccaatggggccgagccctccggccgaaggaagcactggggacgaacctaagagctgtgacaagacccatacgtgtcctccctgccccgctcctgagctgcttggcggaccatcagtgttcctcttcccgccgaagccgaaggacaccctcatgatctcgcggactcctgaggtcacgtgtgtcgtggtggatgtgagccacgaggacccagaggtaaagttcaattggtatgtggatggggtggaggttcataacgcaaagaccaagcctcgcgaagagcagtacaactccacctaccgagtggtgtccgtgcttactgtgctgcaccaagactggctgaacggaaaagaatacaagtgtaaggtcagcaacaaagctctcccggcccccatcgaaaaaaccatcagcaaggccaagggtcaaccgagagagccacaagtctacactctcccgccgagtcgcgaagaaatgaccaagaaccaggtgtcgctgacctgcctcgtgaagggattctacccatcggacattgcggtcgaatgggagagcaatggacagccagaaaacaactacaaaaccaccccgccagtcctcgattcggatggctcgttcttcctttactctaaactgaccgtagataaatcacgatggcaacaagggaatgtgttctcgtgcagcgtcatgcatgaggctctgcacaatcactacactcagaagtcactgagcctgtccccaggaaaa

SEQ ID NO: 15561 - DNA, 1467 bp, synthetic construct; identical to SEQ ID NO: 15525
  misc_feature 1..1467: note = source = /note="Description of Artificial Sequence: Synthetic coding sequence"
  source 1..1467: mol_type = other DNA

SEQ ID NO: 15562 - DNA, 1467 bp, synthetic construct
  misc_feature 1..1467: note = source = /note="Description of Artificial Sequence: Synthetic coding sequence"
  source 1..1467: mol_type = other DNA
atggcaccggtagcagtgtgggctgcactcgcagtcggactggagctgtgggctgcggcccacgcgctacctgcccaagtggccttcacaccatatgccccagagcctggctccacctgtagactgcgagaatactacgaccagacggcacaaatgtgttgcagcaagtgctctccaggacagcacgcaaaggtgttctgtaccaagactagcgatacggtttgtgactcctgtgaggattctacatacactcagctgtggaactgggtgcctgagtgtttaagctgcggcagcagatgttcatctgatcaggtggagacccaggcttgtactcgtgagcagaataggatctgtacttgcaggcctggttggtactgcgctttatccaagcaggagggctgccgcctgtgtgccccgctcaggaagtgccggccaggctttggggtggcaaggccaggcactgagacgtctgacgtggtctgtaagccttgtgctcccggaaccttctccaacaccacttcttcgaccgatatctgtagacctcaccagatctgtaacgttgtcgcgataccagggaacgcaagcatggacgcagtgtgtacctccacctcacctacaagaagtatggcaccgggcgccgtccacctgcctcagcctgtgtctactagatctcaacatactcaaccgactccagagcccagtactgcaccgtctacttccttccttctaccaatgggcccctctcccccggcggaaggatctactggagatgagccaaaatcctgcgacaaaacacacacatgtcccccttgccctgcgcccgagctgttagggggacctagcgtttttcttttcccccccaagccgaaggatacacttatgatatcaagaacacccgaggtaacgtgcgtggtggtcgatgtgagtcacgaggaccccgaagtcaaatttaactggtacgtagacggcgtggaggtgcacaacgccaaaacaaagccccgcgaagagcaatacaacagtacctaccgggtggtttcagtcctgaccgtgctgcaccaggattggctgaacggaaaagagtataagtgtaaagtgagtaataaagctctccccgctcctatcgaaaaaacgatttcaaaagctaagggccagccgagagaaccacaagtctatactttgccaccaagcagggaggagatgactaagaatcaagtttcactgacatgtcttgtgaagggcttttatcccagcgacatagcggtcgagtgggaatctaacggacagcccgagaataactataaaacaactccgcccgttttggactcagacggaagcttctttctctatagcaaactcacagttgacaaatcccgatggcagcagggtaatgtgttcagctgtagtgtgatgcacgaagccctgcacaatcactacactcagaagagcctgtcactttcccccgggaag

SEQ ID NO: 15563 - DNA, 1467 bp, synthetic construct
  misc_feature 1..1467: note = source = /note="Description of Artificial Sequence: Synthetic coding sequence"
  source 1..1467: mol_type = other DNA
atggcacccgttgctgtttgggcagccctagccgtgggtctagagctgtgggcggccgcccacgcacttcccgcacaagtggctttcacaccctatgccccggagcccggcagtacttgtcggttgcgcgaatattatgatcagacagcacagatgtgctgctcaaaatgtagccctgggcagcatgccaaagtcttctgtactaaaacatctgatacagtgtgtgattcttgcgaagactcaacatacactcagttgtggaactgggttcctgaatgcctatcatgtggctcaagatgttcttcagaccaggtcgaaactcaggcatgtacccgggaacagaaccgcatatgcacatgccgccccgggtggtattgtgccttaagcaagcaggaaggctgtcgtctgtgcgcccccctgcgcaagtgtcgcccaggattcggcgtggcgcggccggggacggagacaagcgacgtagtttgtaagccctgcgctcctggcacattttcgaataccacttcctcgactgacatatgtcgaccccaccagatttgtaatgtcgtggcgatccctgggaatgcgtccatggatgcagtgtgtacctcaactagccccactcggtccatggcgcctggtgctgtgcacctcccacagccagtgtccactcggtcccagcacacacagcccacccccgagccctctacagctcccagtacttccttcctgcttccaatgggtccgagtccgcctgcagaagggtctaccggagacgaaccaaagtcctgcgacaaaacacacacatgcccgccctgccccgcccccgaactgctgggaggcccttccgtattcttgtttcccccgaagcccaaggatactctcatgatatccaggacacccgaggtgacgtgtgtggttgtcgacgtgtcccacgaagaccccgaggtcaagtttaactggtatgtcgacggggtagaagttcataacgcaaagacaaagccccgagaagagcagtacaattctacatatagggtggtctcagtcttaaccgtgttgcaccaggactggttgaatggcaaggagtacaagtgcaaagtttccaacaaggccctcccggccccgatcgaaaaaactatctcaaaggccaaggggcagcctcgtgagcctcaggtctataccctccctccctcccgagaagaaatgaccaaaaaccaggtttccctgacctgcctggtaaagggtttctatccgtcggacattgccgttgagtgggagtccaatggacaacccgaaaataattataaaaccacaccgcccgttttggatagtgacgggtccttctttctatattctaagctgaccgtggataagtcacggtggcaacagggcaacgttttttcgtgctccgtgatgcatgaagcacttcataaccactacacacagaagtccctgtccctgtctcctgggaaa

SEQ ID NO: 15564 - DNA, 1467 bp, synthetic construct
  misc_feature 1..1467: note = source = /note="Description of Artificial Sequence: Synthetic coding sequence"
  source 1..1467: mol_type = other DNA
atggcacccgtcgcagtgtgggccgcacttgccgtggggctcgaactgtgggcggcggctcacgcactgccggctcaggtggcattcaccccgtacgcaccagaaccgggatcaacctgcagactgagggagtactacgaccaaaccgctcagatgtgctgctccaagtgctccccaggccagcacgctaaggtgttctgcactaagacttccgataccgtctgtgactcatgcgaggactcgacttacacgcagctctggaattgggtcccagagtgtttgtcttgcggatcaagatgctcctcggaccaggtcgaaacccaagcatgcacccgcgagcaaaaccggatctgtacttgcagaccggggtggtactgcgccttgtcaaaacaagaaggatgccgcctgtgtgcgccgttgagaaagtgcaggccaggatttggagttgccaggccagggactgaaactagcgacgtggtgtgtaaaccatgcgcgccgggcaccttcagcaacaccacgtcgagcacggatatctgcagaccgcaccagatctgtaacgtcgtggcaatcccgggaaacgcatccatggacgctgtctgcacgtcgacttccccgactcgcagcatggctcccggagcggtgcatctcccgcaacctgtgagtacgcgctcgcagcacactcaacccactcctgagccttccactgcgcctagcacctccttcctgcttccaatgggcccgtcaccgcccgccgaaggttccactggagacgaaccgaaatcgtgtgataaaacgcacacttgcccgccatgcccagccccagagctgctgggtggtcctagcgttttcctttttcctccaaagccaaaggataccctcatgatttcgcgcaccccggaggtgacctgcgttgtggtggatgtgagccacgaggatcctgaagtcaaattcaattggtacgtggacggggttgaggttcataatgcgaaaaccaagccgcgggaggaacagtataactcgacttaccgggtggtgagcgtgctgactgtcctgcatcaggactggctcaacggcaaagaatacaagtgtaaggtgtccaacaaggcattgcctgccccgatcgaaaagaccatctcaaaggcaaaaggacaaccgcgggaaccccaggtctacactctgccgccatcgagagaggagatgaccaagaaccaagtgtctttgacttgtctcgtcaagggcttctacccgtcggatatcgcggtggaatgggagtcaaacggacagccagagaacaactacaagactactccgccagtcctggattcagacggtagcttcttcctgtactcgaagctcaccgtcgacaagtcccggtggcagcagggaaatgtgttcagctgtagcgtgatgcatgaggcccttcacaatcattacactcagaagtcgctttcgctgtcgcccgggaaa

SEQ ID NO: 15565 - DNA, 1467 bp, synthetic construct
  misc_feature 1..1467: note = source = /note="Description of Artificial Sequence: Synthetic coding sequence"
  source 1..1467: mol_type = other DNA
atggcccccgtagcagtctgggcggccctggccgttggccttgagctgtgggcagcagcccacgctctaccagctcaggtagcttttacaccgtacgctcccgaaccagggagcacatgccgcctccgggaatactatgaccaaacagcgcagatgtgctgctccaagtgctcaccggggcagcacgccaaagtcttttgcaccaaaacatccgataccgtctgtgattcctgtgaggactctacatacacacagctctggaattgggtccctgaatgcctgtcttgtgggagtcgttgctcaagcgaccaagttgagacccaggcgtgtaccagggaacagaataggatctgcacgtgtagaccaggctggtactgtgcgctgtccaagcaggaaggttgtcgcctgtgcgcccctctccgcaaatgccgacccggatttggagttgccagacctggaaccgaaaccagcgatgtggtctgcaagccttgcgcacctggaactttctcaaacacgacttcctctaccgacatctgccggcctcaccagatttgcaacgtagtcgccatcccaggaaacgccagtatggacgcagtgtgtacatccacctccccaacacggtcaatggctccaggcgccgtccatctgccccagccggtaagcacccgctctcagcacacacagcctacccctgaaccctccactgcccctagtacttcttttctgctgcctatggggccatctccacctgcagagggatcaacgggcgacgagccgaaatcttgtgacaagacgcatacctgtcccccatgccccgctcccgagctgctcggcggcccatccgtctttttattcccacccaagcctaaggacactcttatgatttcgaggacaccagaggtgacatgtgtggtggtggacgtgtctcacgaggaccccgaggttaagtttaattggtatgtggatggcgtggaggtacacaatgctaagactaaaccaagagaggaacagtataattccacatatagggtagttagcgttttgaccgtgctgcatcaggactggctaaacggaaaggaatacaagtgcaaggtgagcaataaggcattacccgctccaatcgaaaagacaataagcaaggccaaggggcaacctcgcgagccacaagtgtacactctgccgccctcgagggaggagatgaccaagaaccaggtgtccctaacgtgtctcgtcaagggcttttatcccagtgatattgccgtggagtgggagagtaacggccagcctgagaacaattataaaaccacgccaccggtactcgactcagacgggagtttcttcctgtatagtaagctgacagtagacaagtctcgctggcagcagggcaacgtattcagctgttcggtgatgcacgaagcactgcacaaccactatacccagaagtccctatccctatcccctgggaaa

SEQ ID NO: 15566 - DNA, 1149 bp, synthetic construct
  misc_feature 1..1149: note = source = /note="Description of Artificial Sequence: Synthetic coding sequence"
  source 1..1149: mol_type = other DNA
atgggggtcctgctcacgcaaagaactctgctgtcactggtgctcgcgctgcttttcccatccatggcctcgatggccatgcatgtggcacagcctgccgtcgtgctggcgtcaagccggggcatcgcttccttcgtgtgcgagtacgcctcaccaggaaaggcaactgaggtgagagtcaccgtgctgcggcaagccgactcacaagtgactgaagtctgcgccgctacgtacatgatgggcaacgaactgaccttcctcgacgactccatctgcacgggaacttccagcggtaaccaggtgaacctgaccatccagggactccgcgccatggataccgggttgtacatctgcaaggtggaactgatgtatccacccccatactatctgggtatcggaaacggtacgcagatttacgtcattgatccggagccgtgccctgatagcgaccaggaaccgaagtcgtcggataagactcataccagcccaccgtcaccggcacccgagctcctcggaggctcttccgtgttcctgttccctccaaagccgaaagatactctgatgatctcgagaactccagaggttacctgcgttgtggtcgacgtcagccatgaggatcctgaagttaagttcaactggtacgtcgacggtgttgaggtccacaacgcaaaaaccaaacctcgcgaggaacaatacaattcaacctaccgggtggtgtcggtgctgactgtgctgcaccaggactggctcaacggaaaagagtacaagtgcaaggtgtcgaacaaggcgttgcccgcaccgatcgaaaagactatctccaaagctaagggacagcccagggaaccacaagtgtacactcttccgccgtcccgcgatgagttgaccaagaaccaagtgtcactcacttgcctggtgaaagggttctacccatcagacatcgctgtggagtgggagagcaacggccagcctgaaaacaactacaagaccaccccaccggtcctggatagtgacgggtcgttcttcctttacagcaaactgactgtcgacaagtcgcgctggcaacagggaaacgtgttctcctgctcagtaatgcatgaagccctgcataaccactacacccagaagtcactgtccctctcaccggggaag

SEQ ID NO: 15567 - DNA, 1149 bp, synthetic construct
  misc_feature 1..1149: note = source = /note="Description of Artificial Sequence: Synthetic coding sequence"
  source 1..1149: mol_type = other DNA
atgggcgtgctccttactcagcgcacgcttctgtcgctggttcttgcgcttctgtttccgtctatggcaagcatggcaatgcacgtggcacaaccggcagtggtgctcgcctcgagccgggggatcgcctcgttcgtgtgtgaatacgcgagcccgggtaaggcgaccgaagtcagagtgactgtcttgcgacaagcggactcccaagtcactgaggtgtgcgccgccacctacatgatgggcaatgagctgaccttcctcgacgactccatctgcaccggaacttcctcgggaaatcaggtgaacctgaccatccaagggctgcgcgcaatggatacgggactgtatatctgcaaggtggagttgatgtacccacctccatattacctcggtatcgggaacggcactcagatttacgtgattgacccggaaccgtgccccgactcagatcaggaaccgaagagctcggataaaactcacactagcccgcccagcccagcccctgagctcctgggcggaagctccgtttttctcttcccgccgaagcctaaggatacgctcatgatctcgcgcaccccagaggtcacctgcgtcgtcgtggacgtgagccacgaggaccccgaagtcaaattcaattggtatgttgatggcgtggaggttcataatgctaaaactaagccgcgggaagaacagtacaactcaacctaccgcgtcgtgtcggtcctcactgtgctgcatcaggactggctgaacgggaaggagtacaagtgcaaagtcagcaataaggcgttgcccgcgcctatcgaaaaaacgatctcgaaggctaagggacagccgagagagccccaggtgtacactctcccaccatctcgtgacgaactcactaagaaccaggtgtcactgacttgtcttgtgaagggcttttacccttcagacattgctgtggagtgggagtcaaacggtcaaccagaaaacaactacaagactacgccgccggtgctcgattcggacgggtcatttttcctgtactcgaagctcacggtggataagtcccggtggcaacaaggcaatgtgttctcgtgctcggtcatgcatgaagccctgcacaaccattatactcagaaatccctgtccctgtccccggggaaa

SEQ ID NO: 15568 - DNA, 1149 bp, synthetic construct
  misc_feature 1..1149: note = source = /note="Description of Artificial Sequence: Synthetic coding sequence"
  source 1..1149: mol_type = other DNA
atgggcgttctcctaactcagaggaccctgcttagcctagtgctggctctgttgttcccaagcatggcctctatggccatgcatgtagctcagcctgcggtagtgctggcgagctcacggggcatcgcttcttttgtgtgcgagtacgcctcacctggtaaagccacggaggttagggttaccgtgctgcggcaagcagacagtcaggtgacagaggtgtgtgctgcaacatacatgatgggtaatgagctcaccttcctcgacgactctatttgtaccgggaccagcagtggtaatcaggtaaatcttaccattcagggtctaagggctatggataccggcctgtacatttgcaaggttgaactgatgtatcctcccccttattacttgggcattggaaacggaacgcagatctacgtcattgaccccgagccatgccctgactcagaccaggagccaaagagttctgacaagactcacacctcaccaccatctccggcacctgagctcctcggagggtcctcagtgttcctatttccccccaagccaaaggacacactcatgattagccgaactcccgaggtaacctgcgtggtcgtggatgttagccacgaggatcccgaggttaaatttaactggtacgttgacggcgtggaagtgcacaacgccaaaaccaagccgagagaggaacaatacaattccacgtacagagtggtgtcggtgcttacagtattgcaccaggattggctgaatgggaaagagtacaagtgcaaagtttccaataaggcactgcctgcgccaatcgaaaagactatatcaaaggctaagggacaaccccgggagccccaggtgtacactctacccccctccagggatgaactcactaaaaatcaggttagcctgacctgtttggttaaaggcttctacccgtctgatatcgcggtggagtgggagtcaaatggccagccagagaacaattacaaaacgaccccaccagtcctggactctgatggaagtttcttcctttattcaaagcttaccgttgataaaagcagatggcagcaggggaacgtcttttcatgctctgtaatgcacgaggcccttcacaaccactatacacagaaatccctgagtttgtcgccaggaaaa

SEQ ID NO: 15569 - DNA, 1149 bp, synthetic construct
  misc_feature 1..1149: note = source = /note="Description of Artificial Sequence: Synthetic coding sequence"
  source 1..1149: mol_type = other DNA
atgggcgtcctgctaactcagagaaccctgttgtccttggttttggcccttctcttccctagcatggcttctatggcgatgcacgtcgctcagccggccgtagtcctggcgtcctcacggggaatagcaagcttcgtttgcgagtatgcatcaccgggcaaggctacagaggtcagagttacagtgcttcgtcaggcagatagccaggttaccgaggtctgtgccgctacctatatgatgggcaacgagctgacctttctggatgattctatttgtactggtacgtcctccggtaaccaagttaatcttacaatccaggggctgagggcaatggacacaggcctgtatatttgtaaggtcgagctaatgtacccacctccgtattatctgggaatcggtaatgggacacagatctatgtgattgatcccgaaccatgccccgacagtgaccaggagcccaagagttccgataagacgcatacatcaccaccgagtccagcaccagaactgcttggaggttcatcggtgtttctatttccccccaaacccaaggatactctgatgatatcacggacaccggaagtgacttgcgtggtggtggatgtgagccacgaggatcctgaggttaaattcaattggtacgtcgacggcgtcgaggtgcacaacgcaaagaccaaaccaagggaggaacagtataactcgacatatcgcgtggtgtctgtcttgaccgttctgcatcaggactggttaaatggtaaggaatataagtgtaaggtgtctaacaaggccctgcctgctcccattgagaaaaccatcagcaaggccaaaggtcagcctcgcgaacctcaagtctatactttacctccttcccgggacgaactcacgaagaaccaagtttccttgacctgtctggtgaaaggattctatccctccgacatcgcagtggagtgggaatcaaacggacagccagagaacaattacaagaccacccctcccgtgctggatagcgatggaagctttttcctttactctaagctcacagtggacaaatcacgctggcagcaagggaacgtcttttcttgctctgtcatgcacgaggcacttcacaaccattacacccagaagtcactttccctcagtcctggtaag

SEQ ID NO: 15570 - DNA, 1149 bp, synthetic construct
  misc_feature 1..1149: note = source = /note="Description of Artificial Sequence: Synthetic coding sequence"
  source 1..1149: mol_type = other DNA
atgggagtcctgttgactcagcggactctccttagcctggtcctcgccctccttttcccatcgatggcgtcgatggcgatgcacgtggcccaacccgcggttgtgctggcctcaagccgcggaatcgcctcgttcgtgtgcgaatacgcttccccgggaaaggccactgaagtccgcgtgaccgtcttgcgacaggctgactcacaagtgactgaagtgtgtgcggccacgtacatgatgggcaacgaactgacgttcctggacgattcgatttgcactgggacgtcctctggaaaccaggtgaacttgaccatccagggcctgcgcgcgatggacaccggtttgtacatctgtaaagttgagctgatgtacccgccaccctactacttgggaatcggcaacggtacccaaatctacgtgatcgaccccgagccgtgccccgattccgatcaagagcctaagtcgtcagacaagacgcacacctcgcctccatcgcctgcacctgaactgctggggggttcttcagtgttcctgttcccgccgaaaccaaaggacaccctcatgatctcccggactcctgaggtcacttgcgtggtggtggatgtgtcacatgaggacccggaggtcaagttcaactggtatgtcgatggggttgaagtgcacaatgcaaagacgaagccacgggaagagcagtacaattctacttacagagttgtcagcgtcctcacggtgcttcaccaggactggcttaacggaaaagagtacaagtgcaaggtgtcgaacaaggcacttccagcccctatcgagaaaaccattagcaaagctaagggacaaccgagggagccacaggtctacaccctcccgccgagcagagacgagctgactaagaatcaggtcagcctgacctgcctggtgaagggattttacccctccgacatcgccgtggagtgggaaagcaatggtcaacccgagaacaactacaaaaccacgccgccagtgcttgattcggatggcagcttctttctctatagcaagctgactgtcgataagtcacgttggcagcagggcaatgtcttttcttgttccgtgatgcacgaagctctgcataaccactacactcagaagtccctgtcgctctcgccaggcaaa

SEQ ID NO: 15571 - DNA, 1149 bp, synthetic construct
  misc_feature 1..1149: note = source = /note="Description of Artificial Sequence: Synthetic coding sequence"
  source 1..1149: mol_type = other DNA
atgggagtcctgctgacgcagagaaccctgctctccttggtgcttgctctgctgttcccgtcgatggcaagcatggcaatgcatgtggcccagcctgcggtggtgcttgcgtccagccgaggcatcgcctcattcgtgtgcgagtacgcctcaccgggaaaggctaccgaggtgcgcgtgaccgtcctgaggcaagccgactcacaagtgaccgaagtttgcgcggccacttacatgatgggaaacgagctcaccttcctcgatgattcaatctgtactggaacgtcctcgggaaaccaggtgaatctcaccatccagggccttcgggcgatggacaccggactctacatctgtaaagtcgagctgatgtatcctcccccatactatctcggaatcggaaacgggacccagatctatgtgatcgacccggaaccatgtcctgattcggatcaggaaccaaagagctcggacaaaactcatactagccctccaagcccggcacctgaacttctcggaggctcctcagtgttccttttcccaccgaagccgaaggacaccctcatgatctcccggacgccagaagtgacgtgcgtcgtggtggatgtgtcccacgaagatccggaagtgaagtttaactggtacgtcgacggagtcgaagtgcacaacgccaagactaagccgcgagaagagcaatacaactccacgtaccgggtcgtgtcagtgctcaccgtgctgcatcaagactggctcaacggaaaggaatacaagtgcaaggtgtccaataaagcactgccggcccctatcgaaaagactatctcgaaggccaagggacaaccgcgcgaaccccaggtgtacaccctcccgccctcgagggatgagctcaccaaaaaccaagtttcccttacttgtctggtcaagggattctacccgtccgacatcgcggtggaatgggagagcaatggacaacctgaaaacaattacaaaactactcctcctgtgctggactcagatgggtcgttctttctgtacagcaagctgaccgtggataagagccgctggcagcagggtaacgtcttttcgtgcagcgtgatgcacgaagctctgcacaatcattacacgcagaagtcgctctccttgtccccaggaaag

SEQ ID NO: 15572 - DNA, 1149 bp, synthetic construct
  misc_feature 1..1149: note = source = /note="Description of Artificial Sequence: Synthetic coding sequence"
  source 1..1149: mol_type = other DNA
atgggagtcctgctgactcagagaacccttctgtcgctcgtcctcgctctgctgttcccatccatggcatcaatggccatgcacgtcgcacaacctgccgttgtcctggcatcctcacgcgggattgcaagttttgtctgcgagtacgcgagccccggtaaggcgactgaagtccgcgttactgtgctgaggcaggccgacagccaggtgaccgaggtctgtgcagcaacgtacatgatgggcaacgaactcactttcctcgacgactccatttgtactggaacctcatcagggaatcaggtcaacctgactatccaagggttgcgagcaatggatacggggctctacatctgtaaagtggaacttatgtaccctccgccctattacttggggattggaaacgggacgcaaatctacgtgattgaccccgagccttgtcctgattcggaccaagaacctaagtcgtctgataaaactcatacctccccgccctcgcctgcgcctgagctcctcggcggttcaagcgtgtttcttttccctcccaagcctaaggatactctgatgatttcacgaaccccagaagtgacttgcgtggtcgtggatgtctcgcatgaagatcctgaagttaagttcaattggtacgtcgatggtgtggaagtgcataacgcaaaaactaagccaagggaggaacaatacaattcgacttaccgtgtcgtgtcggtgctcaccgtgttgcatcaggattggctcaatggtaaagaatacaaatgtaaagtgtcgaataaagcattgcccgcaccaattgaaaagaccatatcgaaagcaaagggacaaccacgggaaccgcaggtctacacgcttccaccctcaagggatgaacttacgaagaaccaggtcagcctgacctgtctcgtgaaaggattctacccatcagatattgcagtcgagtgggaatcgaacggtcagccggaaaacaattacaagaccaccccacctgtgcttgatagcgatggcagcttttttctgtacagcaagctcaccgtggataagagccgctggcaacagggtaacgtttttagctgctccgtcatgcatgaggcactgcataatcattacacccagaaatcgttgtcgctctcccctggaaag

SEQ ID NO: 15573 - DNA, 1149 bp, synthetic construct
  misc_feature 1..1149: note = source = /note="Description of Artificial Sequence: Synthetic coding sequence"
  source 1..1149: mol_type = other DNA
atgggtgtgttgctgacccagaggaccctgttgagcttggtgctggcactgctctttccctccatggccagtatggctatgcacgttgctcagcccgctgttgtccttgctagctcccgcggtatcgcttcttttgtatgcgaatacgcctcccctggaaaagccacagaagtgagagtcactgttctccgccaagccgactctcaggtaactgaggtgtgcgctgcaacctatatgatgggtaacgaattgaccttcctcgatgacagtatctgcaccggcacaagctccggcaaccaggtcaacctgactatccagggtcttcgcgcaatggacaccggcctctacatatgcaaggtcgagctgatgtaccctcccccctattatttgggaatcggcaatggcactcaaatctacgtaatagaccctgaaccctgccccgacagcgaccaagagcctaagagctccgacaaaacacatactagtcctccatcacctgcccccgagcttctgggtggctcttctgtgttcctgttcccccccaagcctaaggataccttgatgatctctcgcactcctgaggtgacctgcgtcgtggtggatgtttctcacgaagaccccgaggtaaagtttaactggtacgtcgacggtgttgaagtgcacaatgccaagactaagccccgtgaggagcaatataattctacttaccgcgtggttagcgtcttgactgttctgcaccaggactggttgaacggaaaagagtataaatgtaaggtaagcaacaaagccttgccagcacctattgaaaagactattagtaaagctaaaggccaacctcgcgagcctcaggtgtataccctccccccttcccgcgacgagttgaccaaaaatcaggtctctctgacctgtctcgtaaagggtttttatccaagtgacatcgcagtggagtgggagtctaacggtcagcctgaaaataactataagactactccccccgtgctggatagcgacggaagctttttcctgtacagcaaattgactgtggacaagtcaaggtggcagcaaggcaacgtgttcagttgctccgttatgcatgaggccttgcataaccattatacccaaaagtctctgtcactgagtcctggaaaa

SEQ ID NO: 15574 - DNA, 1149 bp, synthetic construct
  misc_feature 1..1149: note = source = /note="Description of Artificial Sequence: Synthetic coding sequence"
  source 1..1149: mol_type = other DNA
atgggagtgctgctcactcaacgaacccttctctccctcgtcctggccttgctcttcccatcaatggcgtctatggcaatgcatgtggcacagccagccgtggtccttgcctcgtcgcgcggaattgcatccttcgtgtgcgaatacgcctcacccggaaaggcgaccgaagtcagagtgactgtgctccgccaagcggactcccaagtgaccgaggtgtgcgccgccacgtacatgatgggaaacgaactcacttttctggatgattccatttgcaccggtacttctagcggaaaccaggtgaacctgactatccaggggctgcgcgctatggatactggcctctacatctgcaaggtggagcttatgtacccaccgccttactacctgggcattgggaacggaactcagatttatgtgatcgacccggaaccttgtccggactcagaccaggagccgaagtcctccgacaagactcacacttcgcctcctagcccggcgcccgaactcttgggcggtagctccgtgttcctgttcccgcccaagccgaaagacactctgatgatctcgcgtaccccggaggtcacctgtgtcgtggttgacgtctctcacgaggacccggaggtgaaattcaattggtacgtcgacggggtggaagtgcacaacgcgaaaactaagccccgcgaagaacagtacaattccacgtaccgcgtggtttcagtgctcaccgtgctgcatcaggattggctgaacgggaaggaatacaagtgtaaagtgtctaataaggcactcccggctcctatagaaaaaacgatctcaaaggccaaggggcagccaagagaaccgcaggtctacacgcttccgccgtcacgcgatgagctcaccaagaatcaggtgtctctgacctgcttggtcaagggcttctacccctcggacatcgctgtggagtgggaaagcaacggccaacccgagaacaactacaagacgactcccccggtcctggattcggatggatcgttcttcctgtatagcaaactgactgtggataaaagccgctggcagcagggaaacgtatttagctgcagcgtcatgcatgaggctctgcacaatcactacacccaaaaatccctgtcgctgtcgccgggtaaa

SEQ ID NO: 15575 - DNA, 1149 bp, synthetic construct
  misc_feature 1..1149: note = source = /note="Description of Artificial Sequence: Synthetic coding sequence"
  source 1..1149: mol_type = other DNA
atgggagttctcctgacccaacgcacactccttagcctcgtgctcgccctcttgtttccgtctatggcgagcatggccatgcacgtggcccaaccagccgtcgtgctggcaagctcaagagggatcgcttcttttgtgtgcgagtacgctagtcccggaaaagccacagaagtgcgagtcacggtcctgcgccaagctgattctcaggtcaccgaagtgtgtgctgccacatatatgatgggcaatgagcttacattcctggatgacagtatttgcacaggaacaagctctggaaatcaggttaacctcaccatacagggattgcgggccatggatactggcttgtatatttgcaaagtggagctgatgtatccccctccttactacctgggcattgggaacggtacccagatctacgtgatcgacccagaaccctgccccgattcagatcaggaaccaaaatcttccgacaagacccacacgtcccccccttctccagcgcctgaactgcttgggggctccagcgtgttcttgttccctccgaagcccaaagacaccttgatgatctcaaggactccagaagttacttgcgtggtagtcgatgtctcccacgaggatccagaggtcaagttcaactggtacgtagatggagtggaggttcacaatgccaagactaagcctcgcgaggagcagtacaattctacttatagagtagttagcgtgctcactgtcctgcaccaggactggctgaacggaaaggaatacaagtgtaaagtgagtaacaaggccctgccggcacccattgagaagaccatcagcaaggccaagggccagccaagggagccccaggtctataccctcccccccagtcgggatgagttgacaaagaaccaagtttctttgacctgcctcgtcaagggcttctatccctctgacattgcggtggaatgggagagtaacggacagcctgaaaataattataagaccacaccgcctgtgctggattccgacggctctttcttcctgtatagcaaactcactgtggacaagagtagatggcagcagggcaatgtgttttcttgttctgtgatgcacgaggcgctgcataatcactatacacagaagagtctctcactctcacctggaaaa

SEQ ID NO: 15576 - DNA, 1149 bp, synthetic construct
  misc_feature 1..1149: note = source = /note="Description of Artificial Sequence: Synthetic coding sequence"
  source 1..1149: mol_type = other DNA
atgggggtgctcctgacccaaagaaccctcctttcactggtgctggcgttgctgttccccagcatggcgagcatggcgatgcacgtcgcccagcctgctgtggtgctggcctcatcccggggcatcgcctcgttcgtttgcgagtacgcgtcgccaggcaaggcaacggaagtgcgcgtcaccgttctgagacaagccgattcgcaggtgacggaagtctgtgctgccacctacatgatgggaaatgaactcacgttcttggacgatagcatttgtactggaacctcgagcgggaatcaagtcaatcttactatccagggattgcgcgccatggacaccggactgtacatttgcaaggtggagcttatgtacccacccccatactacctgggaatcggcaacggtacccagatctatgtgatcgacccagaaccgtgcccagacagcgatcaggagccgaagtcctcggacaaaactcacacttcgcctccctcccctgcgccagaactcctgggtggatcgtccgtattcctcttcccgcccaagcccaaggacaccttgatgatttcaaggacccccgaggtgacttgcgtagtggtggacgtctcacacgaggacccggaggtaaagtttaactggtacgtcgatggagtggaagtccataacgcgaaaaccaaacctcgggaagaacagtacaattccacttatagagtggtttcggtgctgaccgtgctgcatcaagattggctgaacggcaaagaatacaagtgtaaggtgtctaacaaagcactcccggctccaatcgaaaagaccatctccaaggcaaaggggcaaccgcgggagccgcaggtctacaccctccccccatcacgcgatgaactcactaagaaccaggtgtcgctgacttgcttggtgaaaggattttacccgagcgacatcgccgtggaatgggaatccaacggacagcccgagaataactacaagacgactcccccggtgctggactccgatggatcattctttctgtactccaagctcaccgtcgacaaatcaaggtggcaacaagggaacgtgttctcttgcagcgttatgcatgaggccctgcataatcattacacgcagaagtcactgagtctgagcccaggaaag

SEQ ID NO: 15577 - DNA, 1149 bp, synthetic construct
  misc_feature 1..1149: note = source = /note="Description of Artificial Sequence: Synthetic coding sequence"
  source 1..1149: mol_type = other DNA
atgggcgtgctcctgactcagagaactctgctgtccttggttctcgcacttctttttccttcgatggcatccatggctatgcatgttgcacagccagccgtggtgcttgcatcatcgagaggtattgcatcatttgtctgtgagtacgcctcgccgggcaaagcaacggaggtgcgcgtgactgtcctccgccaggcagactcgcaagtcactgaagtttgcgcagcgacgtacatgatggggaatgaactgaccttcctggacgactccatctgcaccggtacttcatcaggtaaccaagtgaaccttaccattcagggactgcgggctatggacactggactgtacatttgtaaggtggagctcatgtaccccccaccctactaccttggcatcggaaacggcactcagatttatgtcattgatccagagccttgtccagattccgatcaagaacccaagagcagcgacaaaacccacactagcccaccaagccccgcaccagaactgctgggagggagctcggtgtttctttttccccccaagcctaaggataccctgatgatctcaaggactccagaagtgacgtgtgtcgtggtcgatgtctcacatgaagatcctgaagtcaaattcaactggtacgtggatggagtcgaggtgcacaacgcaaagactaagccccgggaagaacagtacaacagcacttaccgggtggtgtcagtgttgactgtgcttcaccaagactggctgaatggaaaagaatacaagtgcaaggtgtctaacaaggcactgcctgcccctatagaaaagactatttcaaaggctaagggtcaaccccgggagccacaggtgtacacccttcctccttctcgcgacgaacttaccaagaatcaagtctcgctcacctgcctcgtgaagggtttttacccttcggatatcgcagtggaatgggaatccaatggacagcctgaaaacaattacaaaactaccccaccggtgcttgactcagatggctcgtttttcttgtactctaagctcactgtcgataagtcaagatggcaacaaggaaatgtctttagctgctcggtcatgcatgaagccctccataatcactacacccagaagagcctgtccctttcgcctggtaaa

SEQ ID NO: 15578 - DNA, 1149 bp, synthetic construct
  misc_feature 1..1149: note = source = /note="Description of Artificial Sequence: Synthetic coding sequence"
  source 1..1149: mol_type = other DNA
atgggggtgcttctcactcaacgcactctgttgagcttggttctggcgctcttgtttccctccatggcctctatggctatgcacgttgcccagcctgcggtggtgctggcaagcagtagagggatcgcttcattcgtgtgcgagtatgcgtcccccggcaaggctacggaggtaagagtgaccgtgctgcggcaggccgactctcaggtgactgaagtgtgcgcagcaacttatatgatgggcaacgaactgacattcctggatgatagcatctgcaccggcacctcgagcggcaaccaggtcaacctaaccattcaggggcttagagcgatggatactgggttgtacatctgcaaggttgagctgatgtatccccctccctactatctgggtatcggcaacggcacgcaaatttacgttatagaccctgaaccctgcccagacagcgaccaagagccaaagagttcagacaaaacccacacctctcccccttcccctgctcccgaactcctcgggggatccagcgtgtttttattcccccctaaacctaaggacactctgatgatttctaggacccccgaagtgacatgtgtcgtagtggatgtttcgcacgaggatccggaagtgaaattcaattggtatgtggatggcgtcgaagtgcacaacgctaaaacaaaacccagagaggagcaatataactctacctaccgtgtggtttcagttcttactgtgctgcaccaggactggctcaatggcaaagagtataaatgtaaggtcagtaacaaagccctgcccgctccaatagagaaaacaattagtaaagcaaaaggccagcccagagagccccaggtctacaccttgcctccaagtcgcgacgaactgacaaagaatcaggtctccctgacctgcctggtcaaggggttttatccttcggatatcgctgtggagtgggaatctaatggccagcctgaaaacaattacaagaccacgccacccgtgctggactcggatggttccttttttctatactcaaagttgaccgtagataaatctcgatggcagcagggtaatgtgttttcttgtagcgtcatgcatgaggcattacacaaccattatacacagaaatctttgagcctgtcccctggcaaa

SEQ ID NO: 15579 - DNA, 1149 bp, synthetic construct
  misc_feature 1..1149: note = source = /note="Description of Artificial Sequence: Synthetic coding sequence"
  source 1..1149: mol_type = other DNA
atgggcgtgcttctgacccagagaacccttctgtcccttgtcctggccttgctcttcccatccatggcaagcatggccatgcacgtggcacaacccgcagtggtattggctagcagtcggggaatcgcctcctttgtctgcgagtacgcgtctcctggaaaggctacagaggtaagggtgacggtcctccgacaagcggattcccaagtgacagaggtgtgcgcagccacttatatgatggggaacgagctgaccttcctggatgactctatctgcaccgggacgtctagcgggaatcaggtcaacctgacgatacagggacttcgggcgatggatacagggttgtatatctgcaaagtggaactcatgtatccacccccatactatctgggtataggcaatggcacacaaatctacgtgattgatccggagccttgcccagactcagatcaagagccgaagtccagcgacaaaacacacacttcccctcctagcccagctccagagctcctcggaggatcatcagtgttcctgttccctccaaaacccaaggacacattgatgatcagtcgaacgccagaggtgacctgtgtggtggtcgatgtcagccatgaggacccggaggtgaagttcaactggtacgttgacggggtggaggtacataatgctaaaactaaaccgcgggaggagcaatacaactctacttacagggtggtgtccgttttaacggtcctgcaccaggactggttgaacggcaaggagtataagtgcaaggtttcgaacaaggcattgccagctccaatagagaaaacgatttcaaaagccaaggggcagccaagggagccccaggtatataccctccctccatctcgcgacgagctgacaaagaatcaggtcagtcttacgtgtttagtaaaggggttttacccctcagacatcgccgtggaatgggagagcaacggtcagcccgaaaacaattataagaccaccccccctgtactcgatagtgacggctcattcttcctctactccaagttgacagttgacaaatctcgctggcagcagggaaacgtcttttcgtgtagcgtaatgcacgaagccttacataatcactacacccagaaatcactgagcctgagtccggggaag

SEQ ID NO: 15580 - DNA, 1149 bp, synthetic construct
  misc_feature 1..1149: note = source = /note="Description of Artificial Sequence: Synthetic coding sequence"
  source 1..1149: mol_type = other DNA
atgggtgtgctgcttactcaacgaactcttctctcattggtgcttgccctgctgtttccttctatggcatcgatggccatgcatgtggcccaaccagcagtggtgttggccagcagcagaggaattgcatcctttgtgtgtgaatacgcttcccccggaaaggccactgaggtgcgcgtgacggtcctccggcaagcagattcccaagtgactgaagtctgtgcagcaacttacatgatggggaacgaattgacctttctggacgattccatctgtaccggcacgtcgagcgggaatcaagtcaaccttaccatccaaggccttagagcaatggataccggtctgtacatatgtaaggtcgaactgatgtaccctccgccttactatctgggaataggtaatgggactcagatatacgtcattgatccagaaccttgtccagatagcgatcaggaaccaaaatcatcggataagacgcacacctcacctcccagcccggccccggaactcctcggaggctcatcggtgtttctgtttcctcctaaacccaaggacactttgatgatctcccggaccccggaggtgacttgtgtggtggtggatgtgtcccatgaggaccccgaagtgaagtttaactggtatgtggacggagtcgaagtgcacaacgcgaaaaccaagccacgagaagagcagtacaactcgacctatagagtggtgtcggtgttgaccgtgctccaccaggattggctgaatggcaaagaatacaagtgtaaagtctccaacaaagctctgcctgcaccaatcgaaaagactatttcaaaggcaaagggtcagcccagagagcctcaggtgtacactctccccccttcccgtgatgaactgacgaagaaccaagtgtcactgacttgccttgtgaagggattctacccttcagacattgcagtcgagtgggaatccaacggacagccggagaacaactacaagaccaccccaccagtccttgactcagacggatcattcttcctttactcaaagttgaccgtcgataagtccaggtggcaacaaggaaacgttttttcgtgtagcgtcatgcatgaggcccttcacaaccactacacccagaaaagcctctcgctcagccccggtaag

SEQ ID NO: 15581 - DNA, 1149 bp, synthetic construct
  misc_feature 1..1149: note = source = /note="Description of Artificial Sequence: Synthetic coding sequence"
  source 1..1149: mol_type = other DNA
atgggggtacttctcacccaaagaaccctgcttagtctggtcctggcgctactcttccctagcatggcaagcatggcaatgcacgtcgcccagcccgctgtggtcctggccagcagcagaggaatcgcttcttttgtatgcgaatacgcctcacccgggaaagctactgaggtgagagtgaccgtccttaggcaagcagattcgcaggtaactgaagtatgcgctgctacctacatgatggggaacgaactcacattcctcgatgattccatctgcaccggaacctcatctggaaaccaggttaacctgaccattcagggccttcgggctatggacaccggcttgtacatctgtaaagtggaactgatgtaccctcctccttactacttgggaatcgggaacggaacgcagatttatgttattgaccccgaaccctgtcctgactctgaccaggaaccaaagagtagcgacaagactcacaccagccccccctcccctgctcctgaactcttggggggaagttccgtgttcctttttcctcctaaaccgaaggatacccttatgatcagccgcactccagaggtgacatgcgtagtcgttgacgtgagccacgaagaccccgaagtcaagttcaactggtacgtcgatggcgtggaagttcataatgccaaaaccaagccaagggaagagcagtataactcaacttatcgggtagtcagtgttctgaccgttctccatcaggactggctgaacggaaaagagtataaatgtaaagtctcaaacaaggcactcccagctccaatagagaagacgatctccaaggcaaaaggacagcccagagaaccccaagtgtataccctaccccctagcagggacgagctaaccaaaaaccaagtgagcctgacctgtcttgtaaaaggcttctacccgtcagatatcgctgtggaatgggaatcaaatggccagccagaaaacaactacaaaaccacaccgcccgtgctcgatagcgatgggagcttcttcttgtactcgaaactcacagtcgataagagcaggtggcagcaaggcaacgtctttagttgtagcgtgatgcacgaggccttgcataaccactacacacaaaagtcgctgagtttgtcacctggaaaa

SEQ ID NO: 15582 - DNA, 1149 bp, synthetic construct
  misc_feature 1..1149: note = source = /note="Description of Artificial Sequence: Synthetic coding sequence"
  source 1..1149: mol_type = other DNA
atgggagtgctccttacccaaagaaccctcttgagcttggtcctggctctccttttccctagcatggcaagcatggcaatgcatgtcgcacaacccgccgtggttctggcatctagccgagggattgcatcgttcgtctgcgagtacgcgagccctggcaaagcaaccgaggtgagggtgactgtgcttcgccaggccgattcacaagttaccgaagtatgtgcagctacgtacatgatgggtaatgaactgacctttttggacgatagcatctgcacgggaactagttctggtaaccaggtgaatcttaccattcaaggactgcgcgcaatggataccggcttgtacatttgcaaggtagagcttatgtacccacctccatattacctcgggataggaaatgggacccaaatctacgttatcgatccagagccgtgccccgattcggaccaggaacctaaatcgtctgacaagacccatacctcgccaccatcgcctgcaccagaactgctgggcgggtccagcgtgtttctgtttccacccaagcctaaggatacgctcatgatctcgcgcaccccagaggtcacgtgtgtggtcgtggacgtctcccatgaggatccagaagtgaaattcaattggtacgtggatggagtggaagtgcacaacgcaaagactaagcctcgtgaagagcagtacaactccacctaccgggtggtgtcggtccttaccgtgcttcaccaggactggcttaatggtaaggaatacaagtgtaaggtgtccaataaagccctgcccgccccgatcgaaaagacgataagcaaagcaaagggacaacctcgggaaccccaggtttacactctgccaccttcacgcgatgagctgactaaaaaccaggtgtcccttacttgtcttgtgaagggcttttacccttcagacatcgcggtggagtgggaaagcaacggacagccggaaaacaattacaaaaccaccccgcccgttctggacagcgatgggagctttttcctgtactcgaagctcaccgtcgacaagtcacggtggcaacaaggcaacgtcttttcctgctccgtgatgcatgaggccctgcataatcactacacccaaaagtcgctctcactttctcctggtaaa

SEQ ID NO: 15583 - DNA, 1149 bp, synthetic construct
  misc_feature 1..1149: note = source = /note="Description of Artificial Sequence: Synthetic coding sequence"
  source 1..1149: mol_type = other DNA
atgggcgtactactaacacaacggacactgctatccctggttctagcactcctgtttcccagtatggcttcaatggccatgcatgttgctcagcccgccgtggtgctagctagttctcggggtatagcgagctttgtctgtgaatacgcttccccaggcaaggccacagaagtgcgcgtcacagttctgagacaggccgattctcaggttacagaggtgtgcgcagcaacctatatgatggggaacgaactgacgtttctcgatgatagcatctgcacgggaacctcatccggcaaccaagttaacttgacgatccagggcctgcgcgctatggatacagggctatatatctgcaaggtagaattgatgtatccaccaccttactatctgggtatcggcaacggcacacagatttacgtgattgatcccgagccatgccctgactccgaccaggagccaaaaagctccgacaaaactcacacatcccctccatcccccgctccggaactgctggggggtagctctgttttcctgttccccccaaaaccgaaagacacattaatgatctcacgaaccccagaagtcacctgcgtcgttgtagacgtatcacatgaagacccggaagtaaagttcaattggtatgtagacggtgtcgaagtccacaacgctaagacaaaaccacgagaggagcagtataactctacataccgggtcgtgtctgttctgacagtgctgcatcaggactggttaaacggtaaggagtataaatgtaaggttagcaataaagcactccctgcccccatagaaaagacaattagcaaagctaagggccagccacgagagccacaagtctacacactgcctccttcaagagatgaattgaccaagaaccaggtgtccctcacatgtctcgtgaaggggttttaccctagtgatatagcagtggagtgggaatccaacggacagcctgagaataactataagacaacaccaccagtgctggattccgacggatcgttttttctttacagcaaactgacggttgataagtccagatggcagcaaggcaatgtgtttagttgtagtgtgatgcacgaagctctgcataaccactatacacagaaatccttgagcctgtccccgggaaag

SEQ ID NO: 15584 - DNA, 1149 bp, synthetic construct
  misc_feature 1..1149: note = source = /note="Description of Artificial Sequence: Synthetic coding sequence"
  source 1..1149: mol_type = other DNA
atgggagtgctactcactcagcggactctgttatctctagtgttggctctcttattcccttctatggcctcaatggccatgcatgtggcccagcctgctgttgtcttggcaagtagtagggggatcgcgtcattcgtttgtgaatatgcatctcccggaaaggccactgaggtcagggtaacggtgctgagacaggccgactcacaggtgacggaggtctgcgcggccacatacatgatgggaaatgaactgactttcctcgacgactctatatgcacagggacttcttccgggaatcaggtgaacttaactatacaggggctgcgagcaatggatactggactgtacatatgcaaagtagaactgatgtatccacctccctattacttggggataggaaatggaacacagatctatgtgatcgatcccgagccatgtcctgattcagatcaggaaccaaagtcgtccgataaaactcatacatcccctccttctcctgcacccgagcttctcggggggagttctgtttttcttttcccacccaagccaaaagatactcttatgatttcaagaacaccggaagtaacatgtgtggtagtcgatgtttctcacgaagatcctgaagtgaaatttaattggtatgtggatggagtggaagtgcataatgccaaaacaaaacctagagaagaacagtataatagtacatatcgcgtggtgagtgtgttaactgtccttcaccaggactggctcaatgggaaagaatacaagtgtaaagtttccaacaaggcacttcctgcccccatcgaaaaaactatttcaaaagctaagggacagcctcgggaaccccaggtatacactctgcccccatccagagatgaactgactaaaaatcaggtttccctgacatgtcttgtgaaagggttttatccttccgatatagccgtcgaatgggaatccaatgggcagcctgaaaacaactataaaacaacacccccagtactggacagtgatggatcctttttcctatattccaagctgactgtagataaaagtaggtggcagcagggaaacgtattctcctgctctgtgatgcacgaagctttacataaccattatacacagaagagtctgtctctctccccagggaaa

SEQ ID NO: 15585 - DNA, 1149 bp, synthetic construct
  misc_feature 1..1149: note = source = /note="Description of Artificial Sequence: Synthetic coding sequence"
  source 1..1149: mol_type = other DNA
atgggagtgctgctgacccagcgcaccctgctgtcactcgttctggctcttctcttcccgtccatggcctccatggccatgcacgtggcccagcctgccgtcgttctggcttcatccaggggtatcgcctcgttcgtctgtgaatacgcaagcccgggtaaagctactgaggtgcgcgtgaccgtgttgagacaagctgacagccaggtgaccgaggtgtgcgccgcaacttacatgatgggaaatgaattgaccttcctcgacgactcgatctgcaccggaactagctctggcaaccaggtgaacctgactatccaagggctgcgggctatggacaccggtctgtacatctgcaaagtggaacttatgtacccgcccccttattacctggggattggcaatggcactcagatctacgtgatcgatcctgagccctgtccagactccgatcaggaacctaaaagctcagataagactcatactagccccccgtcgcctgcccccgaattgctgggtggatccagcgtctttttgttcccgcctaaaccgaaagacactcttatgatcagcagaactccagaggtgacttgcgtggtcgtggacgtctcgcacgaggacccggaagtcaagttcaactggtacgtcgatggggtggaggtccataacgccaagaccaagccaagggaggaacaatacaactccacttaccgggtggtgtccgtgctgaccgtgctgcatcaagactggctgaacgggaaagagtacaaatgcaaagtgtcgaacaaggcattgccagcgccaatcgaaaagaccatctcgaaagcaaaaggccaaccgagagaaccgcaagtgtacaccctgcccccaagccgcgacgaactcaccaagaaccaggtttcgctcacttgcttggtgaagggattctacccgtccgatattgcggtggagtgggagtcgaacggacagcctgaaaacaattacaagactaccccaccggtgctcgactctgacggctccttcttcctgtactcgaagctgactgtggacaagtcgcgctggcagcaaggaaacgtgttctcgtgctcggtgatgcacgaggccctccacaatcattatacccagaagtcactctcgctgagccctgggaag

SEQ ID NO: 15586 - DNA, 1149 bp, synthetic construct
  misc_feature 1..1149: note = source = /note="Description of Artificial Sequence: Synthetic coding sequence"
  source 1..1149: mol_type = other DNA
atgggcgtgttgctgacccaacgtaccctgctgagcctggtcctggcactgctctttccgagcatggccagcatggccatgcacgtggctcaaccggccgtggtgttggcgagtagcagaggaatcgcctcgttcgtctgtgaatacgctagccctggtaaagcaaccgaggtgcgtgttacggtcctgcgccaggctgattcccaggtcaccgaagtatgtgccgcaacctacatgatgggcaatgaactgacctttctggatgattctatctgcaccggtaccagttccggtaaccaagtcaacctgacgattcaaggtctgcgcgccatggacactgggttatacatatgcaaagtcgagctgatgtaccctccgccctattacttgggtatcggtaatggcacgcagatctacgtcatcgatccggagccgtgccctgactccgaccaggagcccaagagcagcgataaaactcacacaagcccaccgagccctgctcccgagctgctgggtggcagctctgtgttcctgtttccgcctaagcctaaggatactctgatgattagcaggactcctgaggtaacgtgcgtggttgtggatgttagccacgaagatcctgaggttaaattcaattggtacgtggatggggtcgaagtccataacgcgaaaactaagccacgcgaggagcagtacaatagtacctatcgggtggtgagcgtcctgactgtgctgcaccaggattggctcaacggtaaggaatacaagtgcaaggtgtcaaataaggccctaccggccccgattgaaaagaccatcagcaaggctaaaggccagccacgcgagccacaggtgtatactctcccgccaagtagagacgagttgaccaagaaccaggtctcgctgacctgtctggtgaaaggattttatccgtctgatatagccgtggaatgggagagcaatggtcaaccagagaataactacaaaactactcctcctgttctggacagcgacggtagcttttttttgtactctaagctgacagtggacaagtcgcggtggcagcaaggcaatgttttttcatgtagcgtcatgcacgaggcgttgcataatcactacacccagaaaagcctgagcctgtctcctggtaag

SEQ ID NO: 15587 - DNA, 1149 bp, synthetic construct
  misc_feature 1..1149: note = source = /note="Description of Artificial Sequence: Synthetic coding sequence"
  source 1..1149: mol_type = other DNA
atgggggtgctgttgacgcagagaacgctgttgtcgcttgttcttgccctgctgttcccgtcgatggcctcgatggccatgcacgtggcccagccggcggttgtgttggcaagctcgcgcggaatcgccagcttcgtctgcgaatacgcgtccccagggaaggctactgaggtgagagtgactgtgctcagacaggcggattcccaagtgactgaagtgtgcgccgctacttacatgatggggaacgagctgactttcctcgacgactcgatctgtactggaacctcatccggcaatcaagtgaacctcaccatccaaggactgcgggccatggacactggtctttacatttgtaaggtcgaactgatgtacccgccgccctactacctgggaatcgggaacggaacccagatctacgtcatcgatcctgagccctgcccggatagcgaccaagaaccaaaatcttccgacaaaacgcacacttcgcctccttcgcctgcccctgaactgctgggaggaagcagcgtgttcctttttccacccaagccaaaggatactttgatgatctccaggactccagaagtgacttgcgtggtggtggatgtctcgcacgaggatccggaagtcaagttcaactggtacgtggacggagtggaagtgcacaatgcaaagaccaagccgagggaagagcagtataactcgacctaccgggtggtgtccgtccttaccgtcctgcaccaggactggctgaatggcaaggaatacaaatgcaaggtatcgaacaaagcactgccagctcctatcgaaaagactatctcgaaagctaagggacaaccccgcgagcctcaggtgtacaccctgccgccatcgagagacgagctcaccaagaatcaggtgtcactgacttgcttggtgaaaggcttttacccatcggacatcgccgtcgaatgggagtcgaatggccaaccagagaataactacaagaccacgcctccggtgctggattcggatggctccttctttctctactcaaagttgactgtggacaagagcagatggcaacaaggaaatgtgttctcatgttcggtgatgcatgaagcccttcacaatcattacacccaaaagagcctcagcctgtcaccgggaaag

SEQ ID NO: 15588 - DNA, 1149 bp, synthetic construct
  misc_feature 1..1149: note = source = /note="Description of Artificial Sequence: Synthetic coding sequence"
  source 1..1149: mol_type = other DNA
atgggagtgctgttgacgcagcggacattgctttctctagtgctggctctgttattccctagcatggcaagcatggccatgcatgtcgctcagccggcggtggtcctggccagcagtaggggaatcgcaagtttcgtatgtgaatacgcatcccctgggaaagcaaccgaagtccgggtgaccgtgttacgacaggccgactcccaagttaccgaggtatgtgcagccacctacatgatggggaatgagctaactttcctagacgactctatttgcactggaacgagctccggcaaccaggtgaatctgacaatacagggtttgagggcaatggataccggtctatacatctgcaaggttgagctgatgtatccccctccttactacctcggaatcggaaacgggactcaaatctacgtaattgaccctgagccttgtccggactcggatcaggaaccaaagagctcagataagacccatacttcacctcccagtcccgcgcctgagctcctcggaggctcatcagtgttccttttcccccccaaacccaaagataccctgatgatttcccgtacgcctgaagtaacctgcgtcgtagtcgacgtgagtcatgaagaccctgaggttaagtttaactggtatgttgatggcgtcgaggtacacaacgctaaaaccaagccaagagaagagcagtataactccacctatcgcgtggtgtccgtcctgacagtgcttcaccaggactggctcaatgggaaagaatacaaatgtaaggtatccaataaagccttgccagcccccatagaaaagacaatttcaaaggccaaagggcagccccgcgaaccccaggtgtataccctgcctccatcacgtgatgagctcactaaaaatcaggtgtccttaacatgcctcgttaaaggtttctatccctcagacattgcggtggagtgggaaagcaacggacagcctgaaaataactacaagaccacacctcccgtgctcgattccgacggctccttctttttgtacagtaaactgacagtagacaagtcaaggtggcagcaaggcaatgtgttttcctgttccgtgatgcacgaggccctgcacaaccactatacccagaaatccttgtctttgagtcccggcaag

SEQ ID NO: 15589 - DNA, 1149 bp, synthetic construct
  misc_feature 1..1149: note = source = /note="Description of Artificial Sequence: Synthetic coding sequence"
  source 1..1149: mol_type = other DNA
atgggggtgcttcttacgcaacgcaccctcctgtcgttggtgcttgcacttctcttcccatcgatggcgtcgatggctatgcatgtggcgcaacctgcagtcgtgcttgcatcatcgcgtggcatagcatcatttgtgtgtgaatatgcatccccgggaaaggccactgaggtcagagtgacggtgctccgtcaagctgattcacaggtgactgaggtgtgcgcggccacctatatgatgggtaacgaactgactttcttggatgatagcatctgtaccgggaccagctctggtaaccaagtgaacctgactattcaaggtctgcgtgccatggatactggtctgtacatctgcaaagtggaactgatgtacccgccaccttactaccttggaatcggtaacggtactcagatatacgtgatcgatccagagccatgtcctgactcggaccaagaaccaaagagctcagataagacccataccagcccgccttcgccagcaccagaactgctcggaggatcgtccgtctttctgttcccccctaagccaaaggatacccttatgatttccagaactccggaagtgacgtgtgtggtcgtggatgtgtcccatgaagatcccgaagtcaagtttaactggtacgtggatggtgtcgaagttcacaatgccaagactaagccccgggaggagcagtacaacagcacttacagagtcgtgtccgtgctgactgtcctccatcaggattggctcaatggtaaggagtacaagtgtaaggtcagcaataaggcactgcctgcaccaattgaaaagaccatctcgaaggcaaaaggccagcctagagaaccgcaagtgtacactctgcccccaagcagagacgaactcaccaagaaccaggtgtcccttacttgccttgtcaagggtttttacccatcggatattgcggtggaatgggagtcgaatggtcagcccgagaataactataagaccactcctcctgtgcttgattccgacggatcgttttttctgtacagcaagctgaccgtcgacaagtctcgctggcagcaaggcaacgtgttttcgtgcagcgtgatgcatgaagcactgcataatcactacactcagaagtctctgagcctttcccccggtaaa

SEQ ID NO: 15590 - DNA, 1149 bp, synthetic construct
  misc_feature 1..1149: note = source = /note="Description of Artificial Sequence: Synthetic coding sequence"
  source 1..1149: mol_type = other DNA
atgggagtgctgttgacccagcgtaccctgcttagcctggtgctggcactgctgtttccaagcatggcatcaatggccatgcatgtggcgcagcccgcggttgtgctggcaagctcgcggggaatagcgagctttgtttgtgaatacgcctcacccggaaaagccacggaggtgagggtgactgtcctccgacaagccgattcccaagtgaccgaagtgtgtgcggccacttacatgatgggtaacgaactgacttttctggatgactcgatttgcacgggtacgtcctccgggaaccaagtgaacttgactatccagggattgagggcaatggatactggtctttacatctgtaaggtggaattgatgtaccctccaccctactatcttgggatcggcaacggaacccagatttacgtcattgatcccgaaccttgccccgattcggatcaagaaccaaagtcctcagacaagacccataccagcccacccagccccgccccagaattgctgggaggctcctccgtgtttctgttcccacctaagccgaaggataccctgatgatttcccggacgcctgaagtcacctgtgtggtcgtggatgtgtcccatgaagatcctgaggtgaagtttaactggtacgtggatggcgtggaggtccataacgccaagaccaaacctagagaggaacagtacaacagcacctatagagtggtgagcgtgctgactgtgcttcatcaagattggctgaatggaaaagaatacaaatgtaaagtctcgaacaaggctcttccagctccaattgaaaagaccatctccaaggcaaagggtcagccaagagaaccgcaagtctacaccctgcctccatcccgggacgaacttaccaagaatcaagtctccttgacttgtctggtcaagggtttctacccttccgatatcgcagttgaatgggagtcaaacgggcagcctgaaaacaattacaagactacccctcctgtgcttgattcagacggttcattctttctttactcgaaactgacggtggataagtctaggtggcaacaaggaaacgtgttctcgtgtagcgtgatgcatgaggcgctgcataatcattacacccaaaaatcactctccctctccccaggaaag

SEQ ID NO: 15591 - DNA, 1149 bp, synthetic construct
  misc_feature 1..1149: note = source = /note="Description of Artificial Sequence: Synthetic coding sequence"
  source 1..1149: mol_type = other DNA
atgggggtgctgctcacacagagaaccctgttatctctggtcctggccctcttgtttcctagcatggcctccatggcaatgcatgtggctcaaccggctgtcgtgctggcttccagtcgaggcatcgcctcttttgtgtgcgagtatgcctctccgggcaaggctactgaagtgcgggtaaccgttcttaggcaggccgactcccaggttacagaggtgtgcgccgctacgtatatgatgggaaacgagctgacattcctagatgactcgatctgcactggaacctcaagtggaaatcaggtgaacctgactatccagggcctccgagccatggataccgggctgtacatctgcaaggtagagctcatgtatcctccaccatactacctgggaatcggcaatggaacgcagatttacgtcatcgatccggagccctgcccggattccgatcaggagccaaaatccagcgacaagacacacactagccctccaagccccgcgcccgagttgctcggaggctcgagtgtttttctgttcccccccaaacccaaagatactctaatgattagcagaacccccgaagtcacatgcgtcgttgtcgacgtgagtcatgaggacccggaggttaaatttaactggtacgtggatggcgtagaggtgcataacgctaaaaccaaaccacgggaagagcagtataactctacctaccgagtggtgtccgtcctgaccgtgcttcaccaagactggttgaacggaaaagaatacaaatgtaaagtgtctaataaagctttgccagctcctatcgaaaagacaatctcaaaagcgaagggacaaccacgggagccacaggtctacaccctgccacccagtcgagacgagctgacaaaaaatcaggtgtcactcacatgcttggtcaaaggcttctacccatccgacatcgccgttgagtgggaatctaatgggcaaccggagaataactacaagaccaccccacctgtgctggactctgacggctctttcttcttgtactccaagctgacagttgataagagcaggtggcaacagggcaatgtgttctcgtgcagcgtcatgcacgaagctttgcacaaccactatacacagaagtctctgtctctcagtcctggcaag

SEQ ID NO: 15592 - DNA, 1149 bp, synthetic construct
  misc_feature 1..1149: note = source = /note="Description of Artificial Sequence: Synthetic coding sequence"
  source 1..1149: mol_type = other DNA
atgggggtcctgttgacgcagcggacgttgctatccctggtcttggccctcctattcccctccatggcttccatggcgatgcacgtggcgcagcctgctgtcgttttggctagttctagaggcatcgcttcctttgtgtgtgagtatgctagcccaggaaaggccaccgaggtgcgagtgactgtcctccggcaagcggattctcaggtaacagaggtgtgcgccgcgacgtatatgatggggaacgagttgacatttctcgacgactccatctgtacagggaccagctcagggaaccaggtgaaccttaccatccagggcttgagagccatggacaccggactgtatatttgcaaggtcgagctgatgtatcctcctccttattatctgggcattggaaacggtacacagatctacgtgatagaccccgagccctgcccagattcggatcaggagcctaagtcttctgataaaacccacacctcgccaccatctcccgcccctgagctactgggcggcagttcagtctttctgttcccccctaagcccaaggatacgctcatgattagcagaactcctgaggttacctgtgttgtcgtagacgtctcccacgaagatcccgaggttaagtttaactggtacgtcgacggagtggaggtacataacgcaaaaacgaaaccgagggaagagcagtataattcaacttatagagtggtgtcggtgcttacggtgcttcaccaggactggctgaatgggaaagagtacaagtgtaaagtgagcaacaaggccttgcctgcccctatcgagaaaacgatcagcaaagcgaaaggccagccaagggaaccccaagtgtacacacttcccccaagccgggacgagttgaccaagaaccaggtgtctctgacatgcctggtcaagggcttctatccttcagatattgctgttgagtgggaatctaacggacagcctgagaacaactataagacaactccccccgtgctagatagcgacggaagctttttcctctattccaagctgacagttgataagagcagatggcagcagggaaacgtgttcagctgcagtgtgatgcacgaagcgcttcataaccattatacccagaaatcgctcagtctgtcgcctggcaag

SEQ ID NO: 15593 - DNA, 1149 bp, synthetic construct
  misc_feature 1..1149: note = source = /note="Description of Artificial Sequence: Synthetic coding sequence"
  source 1..1149: mol_type = other DNA
atgggagttttgcttacccagagaactctgctgtcactagtgttggcgctgctatttccttctatggccagtatggcgatgcacgtggcccagcctgccgtagtactggcatcttccagaggcatcgccagttttgtctgtgaatacgcctcccctgggaaggctaccgaggttcgagtgacagtcctgcgtcaggccgattcacaagtgacggaggtgtgtgcggctacctatatgatgggcaacgagctgacgttccttgatgatagtatctgcaccggaacttcttcagggaatcaggtcaaccttacaatacaaggcctgcgtgctatggatacaggcctgtacatctgtaaagtcgagctaatgtatcctcctccctactacctcgggatcggaaacggaactcaaatctacgtgattgatccagaaccctgccctgattccgaccaagagccaaaaagtagcgataagacacatacctcccctcctagccctgcccccgaactacttggggggagttcagtgttcctgtttccccccaaacccaaggacactctcatgattagtcgcacacctgaggtgacctgtgtggtggttgacgtgtctcatgaggaccccgaggtgaagttcaattggtatgtggatggagtggaggtccataatgcaaagacaaagcctagagaagaacaatacaactccacttatcgggttgtgtctgtgctgaccgtgttgcaccaggattggcttaatggtaaggaatataagtgtaaagtctccaacaaagccttacccgcccctatcgaaaagactatctccaaggctaaagggcaaccacgggaaccgcaggtctacaccctcccaccatcccgcgatgaactgacgaaaaaccaggtgtccctaacgtgtctcgtgaaggggttttaccctagcgatatcgctgtcgaatgggaatcaaatgggcagcccgaaaacaattacaaaactactcctcccgtcctggatagcgacggctcttttttcttgtacagtaaactgactgttgacaagtcccggtggcagcagggcaacgtgtttagttgtagcgtgatgcacgaggccctccataaccattatacacagaagagcctctctctgagcccaggcaag

SEQ ID NO: 15594 - DNA, 1149 bp, synthetic construct
  misc_feature 1..1149: note = source = /note="Description of Artificial Sequence: Synthetic coding sequence"
  source 1..1149: mol_type = other DNA
atgggggtcctcctaacgcagcgtactttgctgtccctggttctcgctttgctctttccttctatggcgtcaatggcgatgcacgtcgcccagcccgcagtagtacttgcctcaagtagagggatcgccagtttcgtatgtgaatatgccagtcccggaaaagcaacagaggttagagttaccgtgctgagacaggccgattctcaagtgacagaggtatgcgccgccacctacatgatgggcaacgagctcacattcttggatgattccatttgtacaggaacctccagcggtaaccaggtcaaccttaccatccaggggctgcgcgccatggacacaggcctttatatttgcaaggtcgagttgatgtatccaccaccatattatctgggcatcggtaatggcacccagatctacgtgatagaccctgagccctgccccgactctgaccaggaacccaaatcatccgataaaactcataccagcccaccatcgccagcgcccgagctgttggggggctcctcggtgttcctgtttcctccgaagcccaaggacactctaatgatctcgcggacccccgaagtgacctgcgtcgtggtggatgtctctcatgaggacccggaagtcaaatttaattggtatgtcgatggggttgaggttcacaatgccaaaactaaaccccgggaggaacagtataacagtacctatcgagtggttagcgttctgaccgttctccaccaggattggctgaatggcaaggagtacaagtgcaaagtgtcaaacaaagcgctacctgcccccattgaaaagacgatctccaaggccaagggccagccgagggagccacaggtgtacactttacccccaagccgcgacgaactgactaaaaaccaggtgtcactgacatgtctcgtgaagggattctatcccagcgatattgccgtggaatgggagtcaaacgggcaacccgagaacaattacaagaccacacctccagtgctggattccgacggctccttcttcctctattccaaactgaccgtggacaagagcaggtggcagcagggcaatgtcttcagctgctctgtgatgcacgaggcattacacaatcattacactcagaagtcactatctttgagccctgggaaa

SEQ ID NO: 15595 - DNA, 1149 bp, synthetic construct
  misc_feature 1..1149: note = source = /note="Description of Artificial Sequence: Synthetic coding sequence"
  source 1..1149: mol_type = other DNA
atgggcgtgctgttgactcagcgaacattgctcagtcttgtgctcgcactgctctttccaagtatggcgtctatggcaatgcacgtggcccagccagccgtggtactggcctcctcccgaggtatcgcctccttcgtctgcgaatatgcatcccctgggaaggctactgaagtacgagttacagtcttgcgtcaggctgatagtcaggttactgaagtttgcgcagctacctatatgatgggaaatgaactgacgttcttggacgatagtatatgcaccggcacatcatctgggaaccaagtgaatctaacgattcagggcctcagagcaatggacaccgggctgtacatatgcaaggtggagttgatgtatccgccaccgtactatctgggaattggtaatggcacccagatatacgtgatcgatcccgagccgtgtccggatagtgatcaggaaccgaagagttctgacaaaacccacaccagtcccccctcccctgcccctgagctcctgggcggcagttctgtcttccttttccccccgaagcctaaggatacactcatgatcagccgaacaccagaagttacttgtgtggtggtcgatgtctcacatgaggatcccgaggttaagtttaactggtacgtggatggcgtggaggtgcataacgctaaaacaaaaccgcgagaagagcaatacaattctacctatagggtggtgtcagtgctgaccgtgctgcaccaggattggcttaatggaaaggagtacaagtgtaaagtttcaaataaggctctaccggccccaatagagaagaccatttccaaagccaaagggcagcccagggagccgcaggtttacactttgcccccttcacgcgatgagttgaccaagaaccaagtttccctgacctgccttgtgaaggggttttacccatctgatattgcagtcgaatgggagtcaaacgggcaacccgagaacaactataagaccacaccccccgtcctggactcagatgggtcattcttcctgtacagcaaactcaccgtggataagagtcgatggcagcagggcaacgtcttcagctgctccgtgatgcacgaggccctgcacaaccactacacacaaaaatcactctcactttctccagggaag

SEQ ID NO: 15596 - DNA, 1149 bp, synthetic construct
  misc_feature 1..1149: note = source = /note="Description of Artificial Sequence: Synthetic coding sequence"
  source 1..1149: mol_type = other DNA
atgggtgtgctgttaacgcaaaggacactgttgtctctagtcttggccctcctctttcctagcatggcatcaatggctatgcacgttgcacagccggctgttgttcttgcatcgtctagagggattgcaagctttgtgtgcgaatacgcttcgccaggaaaagccacagaggtccgcgttactgtactacgtcaagcggatagtcaagtcactgaggtgtgtgctgcaacatatatgatgggaaacgaactcacatttcttgacgacagcatttgtactggaaccagttcaggaaaccaagttaatttaactatccaaggactgagagcaatggatacaggactgtatatttgcaaagtagagttgatgtatcctccaccatactaccttggaatcggaaatggaacacagatctatgtaatcgatcctgaaccatgtccagatagcgaccaagaaccaaaatcgtctgataaaacacatacctcgccccccagtccggcaccagagttgctgggcggatcatcagtgtttttattccccccaaaaccaaaagatacacttatgattagtagaacaccagaggtgacgtgcgtggtcgttgacgtatcacacgaagacccagaagtcaagttcaactggtatgttgatggagtcgaggttcataatgccaagacaaaaccacgcgaagagcagtataactcaacgtatagagttgtttctgtcctcacagttctgcatcaggattggttaaacggtaaagaatataaatgcaaagtcagcaacaaagcattgcctgctccaattgaaaagactatttctaaggcaaagggtcaaccacgtgagccacaggtttatacactcccaccatcacgcgatgagcttacgaaaaatcaggtttcgcttacatgcttggtgaaaggattttatccgtctgacatcgccgtggaatgggaaagtaacggacagccagagaataattataagacgactccaccagtgctcgattctgatggatcttttttcttatattcgaagcttactgtcgacaaatccagatggcaacaaggaaacgttttttcctgctcagtcatgcatgaagctctccacaatcattacactcaaaaatccctcagtttgtctcccgggaag

SEQ ID NO: 15597 - DNA, 1149 bp, synthetic construct
  misc_feature 1..1149: note = source = /note="Description of Artificial Sequence: Synthetic coding sequence"
  source 1..1149: mol_type = other DNA
atgggagtattgctgacacagagaacacttctaagtctcgtgttggcccttctatttcctagtatggccagtatggcaatgcatgttgcacagccagcagtcgtcctggcctcatcaagaggaatcgcttcttttgtgtgcgaatatgcaagtccaggaaaagctactgaagtacgggtaactgtccttaggcaggctgattcccaggtcacagaagtgtgtgccgcaacatacatgatggggaacgaactcacattcctcgatgattcgatatgtactggaacgtcgtcagggaaccaagtcaatttaactatccaggggctccgggctatggatactgggctctatatatgcaaagtcgaactcatgtatccaccaccctactacctggggatagggaacggaacacagatctatgtaattgatccagaaccctgccccgattcagatcaggaacccaaatcatccgacaagacacatacgtctccaccttcccccgcaccagaacttctgggagggtcgtccgtctttctctttcctcctaaacccaaagatacattgatgatctccaggacacctgaagttacatgtgtggtcgtggatgtatcacatgaagatcccgaagtaaaatttaattggtatgtagatggagtcgaagttcacaacgccaagacaaaacctcgggaagagcagtataattctacttatagagtagtgagtgtgctaacagttttacatcaggattggctgaatggaaaagaatataaatgtaaagtaagtaacaaggctctccctgctcctattgagaaaacaatctcaaaagccaagggacagccacgcgaaccccaggtctatacactgccaccatcgagggatgaactcacaaaaaatcaggtgtctttaacttgcctcgtaaaagggttttacccctctgatatagcagtagaatgggaatcaaatgggcagccagaaaacaattataaaactacaccccccgttttagactctgatggatcattttttctgtatagtaagctaacagttgataagtcccggtggcagcaggggaacgtgttttcctgttctgttatgcacgaagctctccataatcattatactcagaagtcccttagtctatcacccggaaaa

SEQ ID NO: 15598 - DNA, 1149 bp, synthetic construct
  misc_feature 1..1149: note = source = /note="Description of Artificial Sequence: Synthetic coding sequence"
  source 1..1149: mol_type = other DNA
atgggcgtgctgctcacgcagaggactcttctgtcactggttctggcccttctgtttccatctatggcttccatggcaatgcacgtggctcagccggcggtcgtgcttgcatcctccaggggaatcgcgtccttcgtgtgcgagtacgctagccctggaaaggccaccgaggtgagagtcactgtgctgaggcaagcggacagccaggtgacggaggtctgcgcggcaacctacatgatgggcaacgaactgacgtttttggacgactccatctgtaccggcacttcgtcggggaatcaggtcaacctcactatccaaggactgagagccatggataccggactgtacatttgcaaagtcgaacttatgtatcctccaccttattacctcggaattggaaatggaactcagatctacgtcatcgacccggagccatgcccagattctgaccaagagccgaagtctagcgacaaaacccacacttcgccaccgtcaccggcaccggagctcctcggaggttcgagcgttttcctgttcccgccgaagccgaaggacacccttatgatctcccgtactccggaagtgacctgcgtcgtggtggacgtgagccatgaagatccggaagtgaaattcaactggtacgtggacggtgtggaagtgcacaatgcaaagactaagccaagagaggaacaatacaactcaacgtaccgcgtggtgagcgtgctcactgtcctccatcaggactggcttaacggaaaggaatacaaatgtaaggtgtcgaataaggccctgccagccccgattgaaaagaccatctcaaaagccaagggccaaccgcgcgaaccccaggtctacactcttcctccgagccgcgatgaactgactaagaaccaggtatcactgacctgcctcgtcaaaggcttttacccaagcgatatagccgtggagtgggagtcgaacgggcagcctgagaataactacaagactactccgccggtcctggatagcgacggatcgttcttcctgtactcaaagttgaccgtggataagtcgagatggcaacaaggtaacgtgttcagctgctctgtgatgcacgaggcgctgcataaccactacactcagaaaagcctgtcgctgagcccgggcaag

SEQ ID NO: 15599 - DNA, 1149 bp, synthetic construct
  misc_feature 1..1149: note = source = /note="Description of Artificial Sequence: Synthetic coding sequence"
  source 1..1149: mol_type = other DNA
atgggtgttcttcttacccaacgaaccctcctctccctggtccttgccctgctgttcccttcgatggcgtcaatggctatgcatgtggcccaacccgccgtggtcctggcaagcagccgaggaatagcatcgtttgtctgtgaatacgcttccccaggaaaggcaaccgaggtgcgggtcactgttcttcgccaagcggacagccaggtcactgaagtgtgcgcggccacgtacatgatgggaaacgagctcaccttcctggatgactcaatatgtaccggtacgagctcgggcaatcaggtaaaccttaccatccaaggacttagggcaatggataccggcctttacatttgtaaggtcgagctgatgtaccctccaccctactatctgggaatcggtaacggaactcaaatctacgtgattgatccagaaccctgtcctgattcggatcaggaaccgaaaagttcagacaagactcacacctcgccacctagcccagcacctgaactgctggggggctcaagcgtgttcctttttcctccaaaaccaaaggacacccttatgatcagtagaacccctgaggtgacgtgcgtcgtggtggacgtctcccacgaggaccccgaagtcaagttcaactggtacgtggatggcgtggaagtgcataacgcaaagactaagccaagagaggaacagtacaattccacgtatagagtggtcagtgtcctgactgtcctccatcaagactggctcaacggaaaggagtataagtgtaaggtgagcaataaagcacttccagcaccgatcgagaaaactatttcaaaggcaaaagggcagcccagggaaccgcaagtgtacactcttcccccctcacgagatgaactcactaagaaccaggtgtcgctgacttgtctggtgaagggattctatccttcagatattgcggtggagtgggaatccaacggtcagccagaaaacaattacaagacgacccctcctgtgctcgacagcgatggttcgtttttcctctactccaaacttactgttgataaatcccggtggcaacagggtaatgtgttttcctgctctgtcatgcacgaggcactccataatcattatactcaaaagtcgttgtcattgtcccctggcaag

SEQ ID NO: 15600 - DNA, 1149 bp, synthetic construct
  misc_feature 1..1149: note = source = /note="Description of Artificial Sequence: Synthetic coding sequence"
  source 1..1149: mol_type = other DNA
atgggagttctcctgactcagaggaccctgctctccttagtcctggccctgctgttcccctccatggcatcaatggctatgcacgtggcgcagcccgccgtcgtcctggcttccagcagggggatcgcaagcttcgtttgtgagtacgcctcgccaggcaaggcgaccgaggtgagggtgacagtcctacgccaggcggacagccaggtgaccgaggtatgtgccgctacttacatgatgggaaacgagctgacctttctggatgattctatctgcaccggaacgtcctccggcaaccaggtcaatctaactatacaaggtttgagggccatggacacaggactgtacatatgcaaggtggagctaatgtatccgccaccatactacctggggataggcaacggaacccagatttatgtgattgatcccgaaccatgcccagacagtgatcaggagcccaagagcagcgataaaactcacacctctcccccctcacccgcccccgagctcctgggagggagttccgtgttcctcttccccccaaagccgaaggacacgctcatgatctcccgaacccctgaagtcacctgcgtcgtggtggatgtgagtcacgaggatccagaggttaaattcaactggtatgtcgacggagtggaggtccacaatgctaaaacgaagcctcgggaggaacaatacaactcaacgtatcgggtagtgtccgtgcttacggtcctacatcaggattggctaaacggaaaagagtataagtgtaaagtctcaaacaaggcactaccagctcccatcgaaaagactatctccaaggcaaagggccagcctcgcgagcctcaggtgtatacactgccgccctcacgagatgaacttactaagaaccaggtgtcactgacatgccttgtgaaaggattttatccatccgatattgcagtggaatgggagagcaacggccagcctgagaacaattacaaaaccacacccccagtgctggatagcgatggatctttttttttgtactcaaagctaaccgtggacaagagtcggtggcaacaaggcaatgtgttcagttgtagcgtaatgcatgaggccctgcacaatcactacactcagaaaagtctctctttgagtccagggaaa

SEQ ID NO: 15601 - DNA, 1149 bp, synthetic construct
  misc_feature 1..1149: note = source = /note="Description of Artificial Sequence: Synthetic coding sequence"
  source 1..1149: mol_type = other DNA
atgggagtgcttcttactcagcgaacgcttctctcgttggtactggcacttctcttcccaagcatggcctccatggcaatgcacgttgcgcaaccagctgtcgtgctcgcatcgtcgcggggaattgcgtcctttgtttgcgaatacgccagccccggaaaagcaacggaagtgcgggtcactgtgctccgtcaagcagattcgcaagtcacggaagtgtgtgcagccacctacatgatgggtaacgagcttacttttctggatgattccatctgcaccggcacttcgtccggcaatcaggtgaaccttactatccaaggtctgcgcgccatggataccggactgtacatttgtaaggtcgaactcatgtacccaccaccttactaccttgggatcggaaacggaacgcaaatctacgtgatcgaccctgagccatgtcccgattcagaccaggaaccaaagtcgtctgataagacccatacctcacctccatcaccggcaccagagctgcttggtggctcctcagtctttctttttccaccaaagcctaaggataccctcatgatcagcagaaccccagaggttacgtgcgtggtggtcgatgtgtctcacgaggacccagaggtgaagttcaactggtacgtggatggtgtggaagtgcataatgctaagaccaaacccagggaggaacagtacaactcaacctaccgcgtggtttccgtgctgaccgtgcttcaccaggattggctcaatggcaaggaatacaagtgcaaggttagcaacaaagccctgccggcacccattgaaaagactatttccaaggcaaaaggtcaacctagggagccccaagtgtacacccttccccctagccgcgatgagctgaccaagaaccaagtgtcgcttacctgccttgtgaagggattttacccgagcgacattgcggtcgaatgggaatcaaacggtcagcctgagaataactacaagactacgcccccggtgctcgatagcgatggctccttttttctgtactcaaaacttactgtggataaaagccggtggcagcaaggtaacgtgttttcctgctcggtgatgcatgaggcattgcataatcattacacccagaaaagcctttccctgtcccccggaaag

SEQ ID NO: 15602 - DNA, 1149 bp, synthetic construct
  misc_feature 1..1149: note = source = /note="Description of Artificial Sequence: Synthetic coding sequence"
  source 1..1149: mol_type = other DNA
atgggtgtgctgcttacacagaggacactactatctctagtcctagctttgctgttcccttcgatggctagtatggctatgcatgttgctcagcctgcagttgttctggctagttccaggggcattgcaagttttgtttgtgaatacgcctcccctggtaaggccaccgaggtgcgtgtgaccgttttgcgacaagccgacagccaagtgactgaagtttgcgctgcgacatacatgatggggaatgaactaacttttttggacgatagcatatgcactggtacaagctctggtaaccaagtaaacttaaccatacaaggcttgagagctatggatacgggcctatacatatgcaaggttgaattgatgtacccaccaccatattatctaggtatcggaaatggaacacagatctacgtgattgacccagagccttgtcctgactctgatcaggaacctaagagttctgacaaaacacatacttctcccccatctcccgctcccgagctccttggaggttcatccgtcttccttttccctcctaagccaaaggatacattgatgattagtagaacgccggaagttacctgtgttgtggttgacgtaagccacgaggatcctgaagttaagtttaattggtatgtggatggtgtggaagttcataatgctaagaccaaacctagggaagaacaatacaacagtacatatagggtcgttagcgttctcacagtcttgcatcaggactggctcaatgggaaggaatacaagtgcaaggtcagtaataaggcattacccgcgcctattgagaaaactatttcgaaggccaaagggcagccaagggagccccaagtttatacattgccaccaagccgtgatgagctgacgaaaaaccaagtttctctgacctgcttggttaagggtttttatcccagtgacatcgctgtcgaatgggagagcaacggacagccagaaaacaattacaaaactacaccaccagttttggattctgatggctccttcttcctctattctaagctgacagtcgacaaatcacgttggcaacaaggtaatgtgttctcttgtagtgtcatgcatgaggcacttcataatcattacacgcaaaagtctttgtccttgtcacctggaaaa

SEQ ID NO: 15603 - DNA, 1149 bp, synthetic construct
  misc_feature 1..1149: note = source = /note="Description of Artificial Sequence: Synthetic coding sequence"
  source 1..1149: mol_type = other DNA
atgggagttctgctgacgcaacgaacgctgctgtcgctggtgttagcactgttattcccatctatggcttccatggccatgcatgtcgcacagcccgccgtggtacttgcctcgagccgaggaatcgctagctttgtgtgcgagtacgctagcccagggaaagccactgaagtgcgagtgacagtgcttcgacaggccgattctcaggtcactgaggtttgcgctgcaacctacatgatgggcaatgagttgacgttcctagacgactcaatctgtacgggtacaagtagcgggaaccaggtcaacctcacaatacaaggactccgtgccatggatacaggcctttatatctgtaaggtagaattgatgtatccacccccttattatctgggtataggcaatggaacgcagatttatgtcatcgaccccgagccttgccccgactcagatcaggaaccaaaaagttccgacaagactcataccagtccaccatcccccgcccctgagttgctggggggttctagcgtgttcctcttcccgccgaaacctaaggatacactgatgatttcccgaacacccgaagtcacttgtgttgtggttgacgtttcacacgaggacccagaggtcaagtttaactggtacgtagacggggtggaggtgcataacgcaaagacaaagcccagggaagaacagtacaactctacttacagggtggtgtctgtgctgaccgttctgcaccaagattggctgaacggcaaagagtacaagtgcaaggtatcaaacaaagccttgcccgcacccatagagaagacgatttcaaaggcgaagggtcagcccagagaacctcaagtatacacactacctccgagcagggatgagctaacgaaaaatcaggtgagtctgacttgcttggtcaaaggcttttacccctccgacattgcagtagaatgggagtctaatggacaacccgaaaacaactacaaaacaactcccccggttctggactcagatggctccttttttttgtactccaaattaacagtggataagtctcgctggcagcagggtaatgtgttctcgtgttcggtcatgcacgaagccctgcataatcattacactcagaagtctctttctttgtcccccggtaag

SEQ ID NO: 15604 - DNA, 1149 bp, synthetic construct
  misc_feature 1..1149: note = source = /note="Description of Artificial Sequence: Synthetic coding sequence"
  source 1..1149: mol_type = other DNA
atgggcgttcttttgacccaaagaaccttgctctccctggtgctggcattgctttttccttcaatggcctccatggccatgcacgtagcccaaccggccgtggtgttggcatcatcacgcggtatcgcttccttcgtatgtgagtacgcatcaccgggtaaggccacggaagtcagagtgaccgtactcagacaggctgattctcaagttaccgaagtatgcgctgccacgtacatgatgggcaatgaactgacctttctggacgacagcatatgcaccggtaccagttccggtaaccaagtaaacctgaccatacaaggactcagagccatggataccggtttgtatatatgcaaggtagagctgatgtaccccccgccctactatcttggaatcggtaatggcactcagatttacgtgattgacccagagccatgcccagattctgatcaggagcccaagtcatctgataaaacacacacctcacccccctcaccagctccagaattgctgggcggctcctcagtattcctcttccctcccaagccgaaagacacactcatgatatctagaaccccagaggtcacctgtgttgtggtggacgttagccatgaagacccagaggtgaagttcaattggtacgtagacggagtcgaggttcataacgcgaagacaaaacccagagaagagcagtacaactccacatacagggtggtgtccgtccttacagtgctgcaccaggactggctgaatggaaaagagtacaaatgtaaggtttcaaacaaagctcttcctgcgcccatcgaaaagaccattagtaaggcaaagggccagccgagggagccccaggtgtatactttgcctccatcccgcgacgagctgacaaagaatcaagtttcactgacgtgcctcgtaaagggcttttatcccagcgatatcgcagtcgaatgggaaagcaacggtcagccggagaacaattataagaccacgcccccggtcctggattcagacggtagtttcttcctgtactcaaaactgacagtggacaagtccagatggcagcagggaaacgtcttctcctgtagcgtgatgcacgaggcactgcataatcattacacccagaaatctctgtctctgtcccccggaaag

SEQ ID NO: 15605 - DNA, 1149 bp, synthetic construct
  misc_feature 1..1149: note = source = /note="Description of Artificial Sequence: Synthetic coding sequence"
  source 1..1149: mol_type = other DNA
atgggagtgctgcttactcaacgaacccttctgtccctggtcctcgccctgttgtttccatcaatggcttcgatggccatgcatgtggcacaacccgcagtggtgctggcgtcaagccgtggtatagcatccttcgtgtgtgagtacgcctcgccaggcaaggcgactgaagtgagagtcacggtcttgcgtcaggcagattcgcaggtgaccgaggtctgtgcagccacttatatgatgggtaatgaactgacttttctggatgactccatttgcaccggcacgagctccgggaaccaggtgaatcttactattcagggccttagagcaatggatactggcctttacatttgtaaggtggagcttatgtacccccctccgtactatctcggaataggtaacggaactcaaatctacgtgatcgatcctgagccttgccctgatagcgatcaagaacctaagtcatccgataagacgcataccagtcctccctcaccagcgccagagctcttgggaggatcttcagtttttctgttcccaccaaagccgaaggacaccctgatgatttcgcggaccccagaggttacttgtgtggttgtggatgtgtcgcatgaagatcccgaggtgaaattcaactggtacgtggacggggtggaagtgcacaatgcaaaaactaaacccagagaggagcagtacaattctacctaccgcgtggtgagtgtgttgaccgttcttcatcaagactggttgaacggaaaggaatacaaatgcaaggtgtcaaacaaggctttgccagccccaatcgaaaagactatttcgaaagcaaagggccagcctcgcgaaccgcaagtgtatacccttcctccttcgcgggacgagttgaccaagaatcaagtgagccttacctgtttggtgaaagggttctacccctcggacatcgctgtagaatgggagtccaacgggcagcccgaaaacaactacaagaccactcctcctgtcctggactcagatggttccttttttctctactccaagctgaccgtggataagagccgctggcaacaaggcaatgtattctcctgtagcgttatgcatgaagcacttcataaccactacacccaaaaatccctctcgctctcgccaggaaag

SEQ ID NO: 15606 - DNA, 1149 bp, synthetic construct
  misc_feature 1..1149: note = source = /note="Description of Artificial Sequence: Synthetic coding sequence"
  source 1..1149: mol_type = other DNA
atgggagtgctgcttactcaacggactcttctgtcgctcgtgttggccttgctgtttccatcaatggccagcatggcaatgcatgtggcacaaccggcagtggtcctggcatcgagcagagggattgctagcttcgtgtgtgaatatgcgtccccgggaaaggcaactgaggtgcgcgtgactgtccttagacaagcggactcccaagtgaccgaggtgtgtgcggcgacgtacatgatgggaaacgagcttaccttccttgatgactccatatgcactggaactagcagcgggaaccaagtgaacttgaccattcaaggactccgtgcaatggacactggactgtacatctgtaaagtggagctcatgtacccacccccatactaccttggaatcggaaacggcacgcagatatacgtcattgatcccgaaccctgtcccgactccgaccaggaacctaagagcagcgacaagacccatacttcccctccttcgccggccccagaacttctgggaggctcgtcagtgttcctgtttcctcctaagccaaaggatactttgatgatctcccgtaccccagaagttacctgcgtggtcgtggatgtctctcacgaagatcccgaagtgaaattcaactggtatgtcgatggtgtggaggtgcataacgccaagacgaagcctcgggaagaacaatacaactcaacgtacagagtcgtctcggtccttaccgtgctgcatcaggactggctcaacgggaaggagtacaagtgcaaggtgtccaataaggctctccctgcaccaattgaaaaaactatctccaaagcaaagggacaaccacgagaaccacaagtgtacacccttccaccttcgagggacgaacttactaaaaaccaagtcagcctgacttgtctcgtgaaaggcttttacccgtccgatatcgcagtggagtgggaatccaatggacagccagagaataactacaagactacccctcccgtgcttgacagcgacggatcgttttttctgtactcgaaactgactgtggataagtcgaggtggcaacaaggaaacgtgttttcatgtagcgtcatgcatgaggcactgcataaccattacacccagaagagcctgtccctttcacctggtaaa

SEQ ID NO: 15607 - DNA, 1149 bp, synthetic construct
  misc_feature 1..1149: note = source = /note="Description of Artificial Sequence: Synthetic coding sequence"
  source 1..1149: mol_type = other DNA
atgggcgtgcttcttacccagcgaaccctactttccttagtattggccctgctgtttccttcaatggctagtatggcaatgcacgtggcacaacctgccgtagtcttggccagttctcgaggtatcgccagtttcgtctgtgaatatgccagccccggaaaagctacggaagtccgagtgactgttcttagacaggctgacagtcaggtgacagaggtatgcgccgccacctatatgatgggaaacgaactcaccttcttggacgactctatttgcaccgggacttcaagcggaaatcaggtcaacctgaccattcagggcttgcgcgccatggataccggactctacatctgcaaagtggaactgatgtacccgcccccttactacctgggcataggcaacggcacgcagatctacgtgattgatccggagccatgccccgattctgaccaggaaccgaaatctagcgacaaaactcacacctccccaccatcgcccgctccggaactattggggggatcttccgtgttcctgttcccgcctaaaccaaaggataccctgatgatttcacgaacgcccgaggtcacctgtgtggtagtggatgtgtcacacgaggacccagaggttaagttcaattggtacgtcgatggagtagaggtacacaacgccaagacaaagcctagagaggagcagtataactccacataccgggttgtcagcgtgctcaccgtgctccaccaggattggcttaatggtaaagaatacaagtgtaaggtatccaataaggcgctccccgcacctatcgagaagactatcagcaaagccaaaggacaaccccgtgaacctcaggtgtatacactgcctccttccagagatgagctcaccaaaaaccaagtgagtttgacttgcctcgttaagggcttctacccatccgacatcgctgtggagtgggaaagtaatgggcagccagagaacaattacaagaccacccctccagtcctggattctgatgggtccttctttctgtattccaaactgacggtggataagtcaagatggcagcaaggaaatgtcttcagctgttctgttatgcacgaggccctgcacaaccactatacacaaaagtctttatcgttaagtcctggcaaa

SEQ ID NO: 15608 - DNA, 1149 bp, synthetic construct
  misc_feature 1..1149: note = source = /note="Description of Artificial Sequence: Synthetic coding sequence"
  source 1..1149: mol_type = other DNA
atgggggttctgctgacacagagaacattattatctcttgttctcgctctactgtttccctccatggcatcaatggccatgcacgttgcccagcctgctgttgtgctggccagttctcggggcatcgcttcatttgtgtgcgagtatgccagtcccgggaaagccacagaggtgagggtgaccgtgctacgccaagccgattcccaggtgaccgaggtgtgcgctgctacatacatgatgggcaacgaactgaccttcctggacgacagcatctgcactggtacttcttctggaaaccaagtgaatctcactatccagggtctgcgcgcaatggatactggcctgtacatttgtaaggttgaactgatgtaccccccaccctactatctcgggattgggaacgggacccaaatctatgtgattgaccccgaaccgtgtccagactcagatcaggagcccaagtcttccgataagacacacaccagccctcccagtccagcccctgagctgctaggcggaagctctgtgtttctgtttccacctaaacctaaggacacactgatgatcagtcgcacccccgaggtgacctgcgtcgtggtagatgtatcccatgaggatcctgaggttaaattcaactggtacgtagatggcgttgaggtgcacaacgctaaaacaaagccaagagaagagcagtacaattccacataccgcgtggttagcgttctgaccgttctgcatcaggactggttaaacggaaaggagtacaagtgcaaggtctccaataaagcactgccagcacctattgaaaagacaataagcaaagcaaaaggccagccacgagaacctcaggtttatactctccctccttcaagagacgaactcacaaaaaatcaggtgagcctcacatgtctggttaaaggattctacccttccgatatcgctgtcgagtgggagtctaacgggcagccagagaacaattataagactaccccccccgttttagactccgacggctcatttttcctctattccaaactcaccgttgacaaatcccgctggcagcaaggcaacgtcttctcctgttccgtcatgcatgaagcactgcacaaccattatacccagaaaagcctgtctctgtcaccaggcaag

SEQ ID NO: 15609 - DNA, 1149 bp, synthetic construct
  misc_feature 1..1149: note = source = /note="Description of Artificial Sequence: Synthetic coding sequence"
  source 1..1149: mol_type = other DNA
atgggggttctgctgacccaacggactctcctgtccctcgtcctggcgctcttgttcccttcgatggcctcaatggcgatgcacgtcgcccagcctgcggtggtcctggcctcgtcgcgcggaatcgcatctttcgtgtgcgaatacgcctccccgggaaaagccaccgaagtgcgcgtaaccgtgctcagacaggccgacagccaggtgaccgaggtctgcgccgccacttacatgatggggaacgagctgactttcctggacgacagcatctgtaccggaacgtcgtcgggaaaccaggtcaacctgactatccaggggctgcgggccatggacactggcctgtacatctgcaaggtggaactgatgtacccgccaccgtactacttgggaatcggaaacgggacccaaatctatgtgatcgaccctgagccatgtccggattcggaccaggagccaaagagctcggataagactcacacttccccgccgtcgccggccccggagctgctgggaggaagctcggtgtttctgtttccaccgaagccaaaggacactctgatgatttcccgcactcctgaagtcacttgtgtggtggtcgacgtgtcgcacgaggacccggaggtgaaattcaactggtacgtggacggtgtcgaggtgcacaacgctaaaaccaagccaagagaggagcaatacaactcgacgtaccgcgtcgtgagcgtgctgaccgtgctccaccaggattggctgaacggtaaggaatacaagtgcaaggtgtccaataaggcccttcctgcgccgattgaaaagactatttcgaaggcgaagggacagccgcgggagccgcaggtgtacaccctccctccgtccagggatgagctcacgaagaaccaggtcagcctcacctgcctggtgaagggtttctacccctcagacatcgcagtcgaatgggaatccaatggacagccggagaataactacaaaactaccccacccgtgctcgactccgacggatccttctttctctactcgaaactcaccgtggataagtcaagatggcaacagggcaacgtgttctcatgctcggtcatgcatgaggccctgcataaccattacactcaaaagtcgctgagcctgtcaccaggaaag

SEQ ID NO: 15610 - DNA, 1149 bp, synthetic construct
  misc_feature 1..1149: note = source = /note="Description of Artificial Sequence: Synthetic coding sequence"
  source 1..1149: mol_type = other DNA
atgggtgtattactcacccaaagaactttgctttccctcgtcctggccttactttttcctagtatggcctctatggcaatgcacgtggctcaaccagcagtggtacttgctagctctcgggggattgcctctttcgtctgcgagtatgcttcacctggaaaagcaaccgaagttagggtgaccgtattgagacaagctgactcccaagttacagaggtttgtgctgcaacctacatgatgggaaatgagcttacatttctagatgacagcatatgcaccgggaccagcagcggaaaccaagtgaacctgaccatccaaggattgagggccatggacacaggactctatatttgtaaggtggaacttatgtacccacccccttactatctgggaatcggcaacgggacccagatctatgtcatcgaccctgaaccatgccctgattccgaccaagaaccaaagagcagcgacaagacgcacactagcccccctagcccagcacccgagttacttggaggatcgagtgtgtttttgtttccacccaagcccaaagatactctgatgatttcaaggacccccgaagttacttgcgtcgtagtcgatgtgagccatgaggatccagaagtgaagttcaactggtacgtcgatggtgtggaagtgcacaatgcaaaaactaaacctcgcgaagagcagtataatagcacatacagagtagtctccgtgcttactgtgctgcaccaagattggcttaacggcaaagagtataaatgtaaagtctcgaacaaagccctcccagctccaatcgaaaagaccatctctaaggccaaaggccagcccagggaacctcaggtgtatactttaccaccaagcagagacgagttgacaaagaatcaggtatcacttacttgcctggttaaaggtttctatccaagcgacatcgcggtggagtgggaaagcaacgggcaacctgagaacaactacaaaactacaccaccagtcctggacagcgatggttctttctttctgtacagcaagttgaccgtggataaaagcaggtggcagcaaggaaacgttttcagttgcagcgtgatgcatgaggcactgcacaaccactacacacagaagagcctctcccttagtcctgggaaa

SEQ ID NO: 15611 - DNA, 1149 bp, synthetic construct
  misc_feature 1..1149: note = source = /note="Description of Artificial Sequence: Synthetic coding sequence"
  source 1..1149: mol_type = other DNA
atgggggtcctgctgacccagcgcacacttctgagcctggtgttagcgctgctgttcccgagcatggcgtcaatggcaatgcacgtggcgcagccagctgtcgtgctggctagttccagaggcatcgcttcgtttgtttgcgaatacgcatcccccggaaaggcgaccgaagtgcgagtaacagtgctgagacaggccgactcacaggtcaccgaagtttgcgctgctacctacatgatgggcaatgagcttaccttcttggacgacagtatttgtacaggaacatccagtggcaaccaggtcaatttgactatccagggtctgagggctatggataccgggctgtacatctgcaaggtggagctgatgtacccccctccatattacctcggtatcgggaatggcacacagatttatgtgatcgatcccgagccttgtcctgatagtgaccaggagcccaagtcgagcgacaagacacacaccagtccacctagcccagctccagaactgttgggcggctcttctgtgttcctcttcccccccaaaccgaaagatacgctgatgatctcccggacaccagaggtgacatgcgtcgtcgttgacgtcagccacgaagacccggaggttaaattcaattggtacgttgatggagttgaggtgcacaacgcgaaaacaaaacctagggaggaacagtacaactctacataccgagtggtgtccgtgctgaccgtcctgcaccaggattggctgaacgggaaggaatataagtgtaaggtgtcgaataaggctttgcccgctccaatcgaaaaaactatttcaaaggccaaagggcagccaagagaacctcaagtttataccttgccaccttcacgagacgagctgactaagaaccaggtaagcttgacatgcctggtcaagggattctacccatctgatattgctgtggaatgggagtctaacggtcagcccgagaacaattataaaaccacccccccggtgctagatagtgatggcagtttttttttgtactctaagctcaccgtcgacaagtcaaggtggcagcagggtaatgtattctcctgtagcgtgatgcatgaagctcttcacaaccactacacccagaaatccttgtctctgtctcccggaaag

SEQ ID NO: 15612 - DNA, 1149 bp, synthetic construct
  misc_feature 1..1149: note = source = /note="Description of Artificial Sequence: Synthetic coding sequence"
  source 1..1149: mol_type = other DNA
atgggcgttctgctcactcagcggacgctgctgtcacttgtactggctctgctctttccatcgatggcgtctatggcgatgcacgtagcgcaaccggccgtagtgttggccagcagtcggggcatcgcctcattcgtgtgcgagtatgcctcgccgggcaaagccactgaagtgagagtcaccgtgctgagacaggctgactcacaggtgactgaagtttgtgcagccacctatatgatgggcaacgaactgacatttttggatgacagcatctgtaccgggaccagctccgggaatcaggtgaaccttactatccaggggctgcgggccatggatacaggcctctatatttgtaaagttgagttgatgtacccacccccttactacctcgggattggaaatggtacacagatttatgtgatcgatccggaaccctgccccgactccgatcaggagccgaagagctccgacaagacccacacaagcccccccagccccgcccccgagctgttgggtggttctagtgtgttcctgttcccccccaagccgaaggacacgcttatgatctcccgcactcctgaagttacatgtgttgttgtggacgtgtcccacgaagacccagaggtcaagttcaattggtacgtggacggggttgaagtgcacaatgccaaaaccaaaccacgcgaggaacaatataacagcacgtaccgggtggtcagcgttctcacggtcttgcatcaggactggctgaacgggaaagaatacaagtgcaaagtttctaataaggcactgcctgcgccgatcgagaaaacaatttctaaggccaaaggacagccaagagaacctcaggtttacaccttgcctccatccagggacgaactgaccaaaaaccaagtatctctcacttgcttagtgaaaggattctatccctcagacattgctgttgagtgggagtctaacggacagcccgaaaacaattacaaaaccacccccccagtcttagactctgacggcagcttcttcttatattcaaagctgacagtcgataaaagcaggtggcagcagggtaatgtcttttcatgttcggttatgcacgaggccctgcacaaccattatacccagaaaagtctgagcttatccccgggtaag

SEQ ID NO: 15613 - DNA, 1149 bp, synthetic construct
  misc_feature 1..1149: note = source = /note="Description of Artificial Sequence: Synthetic coding sequence"
  source 1..1149: mol_type = other DNA
atgggcgtgttgctgactcagagaaccctgttgagtctggtgctggcccttctttttcctagcatggcaagtatggccatgcacgttgcacagcctgctgtggtgctggctagctcaaggggaatcgcttccttcgtctgcgaatacgcatctcctgggaaggccaccgaggtccgcgtaacagtgctgcgacaggcagactctcaggtcacggaggtgtgcgccgccacttatatgatgggcaatgaactgacttttctggacgattctatctgtaccggaacttctagtggaaatcaggtgaacttgaccattcagggcctccgggcaatggacacggggctctatatttgcaaggtggaactgatgtaccccccaccctattacttgggcattggcaatggcacacagatttatgtcatcgaccccgaaccctgccctgattcagaccaagagccaaaatctagcgataagacacacacgagtccccccagtcccgctccagagcttctgggggggagcagcgtctttttgttccccccgaaacctaaggatacactgatgatcagcagaactccggaggtgacttgtgtggttgtcgatgtgtctcatgaggatccagaggtcaagttcaactggtatgtcgatggagtagaggtgcacaacgctaagaccaagcccagagaggagcaatacaactccacataccgagtagtctctgtgttgaccgtgctccatcaggactggcttaacgggaaagagtataagtgcaaggttagtaacaaggctcttccagctcctattgaaaaaaccatctctaaagcaaaaggtcaacctagagagccgcaggtctacacactccctcccagtcgggatgagctcaccaaaaatcaggtcagtcttacttgtctggttaaaggcttttacccgtccgacattgccgttgagtgggaatctaatggtcaaccggagaataattacaagaccactcctccagtcctcgactcagacgggtcctttttcctgtacagcaagttgactgtagataaaagccgatggcagcaaggtaacgtattcagctgctccgttatgcacgaggcccttcacaaccattatactcagaaatctctgtcactgtcaccaggtaaa

SEQ ID NO: 15614 - DNA, 1149 bp, synthetic construct
  misc_feature 1..1149: note = source = /note="Description of Artificial Sequence: Synthetic coding sequence"
  source 1..1149: mol_type = other DNA
atgggtgtcttgcttactcaacgtacgcttttgtctctcgttctggcgttactgtttcctagcatggctagcatggctatgcatgttgcgcaacctgcagttgtcttagcgtccagccgtggtatcgcatcgtttgtctgtgaatatgcgtcgcccggcaaagccacagaggtgagggtcacggttctgcgccaagctgattcccaagttactgaagtgtgtgcagcgacatatatgatgggaaatgagctgacgtttttagatgacagcatctgcaccggtacatcctccggcaatcaggttaatctaacgattcaaggtcttagagcgatggatacaggcctgtatatctgcaaagtcgaactcatgtacccgccgccttattatcttggtatcggcaatggcacacaaatctacgtgatagatccggaaccatgccctgacagcgatcaagaacctaaaagtagtgataagacacatacaagccccccgtcaccagcgccagaattgcttggcggctctagcgtgtttcttttcccacctaaaccgaaagatacattgatgatctcgcgcacacccgaagttacatgcgtagttgttgacgtgtctcatgaagatccagaagtaaagttcaattggtacgttgatggcgtagaagtccataacgctaaaacgaaaccaagagaagaacaatataattcaacttacagagttgttagcgtgctcacagtgctgcatcaggattggctgaatggtaaagaatacaagtgcaaagtctcaaacaaagctcttcctgctcccattgaaaaaacgatttcgaaggccaaaggccaaccccgtgagccgcaagtatacacactcccgccatctagagatgaactgacaaaaaaccaagtaagcctgacctgtttagtgaaaggattttacccgtcagatattgcagtggaatgggaaagcaatggccaaccggagaacaactataaaacaactccgcctgtgttggattcggatggaagcttttttttgtattctaagttaacggtcgataaaagcagatggcaacaaggtaatgttttttcctgttctgtgatgcacgaggcactacataatcattatacacaaaaaagtctgtcgctgtcgccgggtaaa

SEQ ID NO: 15615 - DNA, 1149 bp, synthetic construct
  misc_feature 1..1149: note = source = /note="Description of Artificial Sequence: Synthetic coding sequence"
  source 1..1149: mol_type = other DNA
atgggagtcttgctcactcagaggaccctcctgtcgctggtcctcgctcttctctttccgtctatggcaagcatggcaatgcatgtcgcccaaccggcagtagtgttggcaagctccagaggcatcgcctcgtttgtttgcgaatacgcatcgccaggcaaggccactgaagtgagagtgacggtgctccgccaagccgacagccaggtgactgaagtgtgcgccgcgacctacatgatggggaacgaattgaccttcctggatgacagcatctgtaccggaacgtcgtccgggaaccaggtcaatctgaccatccagggacttcgcgccatggataccgggctctacatttgcaaagtggagctgatgtaccctccaccatactacctgggcatcggaaacggaacccaaatctacgtgattgatccggagccctgcccagattcagatcaagaaccgaagagctctgataagactcatacctccccgccctccccagcgccggaactgctgggaggctcgtccgtgtttctgttcccaccgaagccgaaggataccctcatgatctcccgcactccagaggtgacttgtgtggtcgtggatgtctcccacgaagatccggaagtcaaattcaattggtacgtggacggggtcgaagtccacaacgccaaaaccaagccgagagaggagcagtacaactcgacctacagggtcgtgtccgtgttgaccgtgctgcatcaggactggctgaacggcaaagagtacaagtgtaaggtatccaacaaggccctgccagccccgatcgaaaagactatcagcaaagcgaagggtcagccgcgggaaccccaggtgtacactctgccaccttcgcgggacgaactgactaagaatcaagtctccctgacctgtctggtgaaggggttctaccctagcgatatcgccgtggagtgggagtcgaatggccagccagagaataactacaagaccacccctcctgtcctggactcagatggcagcttcttcctctactcaaagctgaccgtcgacaagagccgctggcaacagggaaacgttttcagctgctcagtcatgcacgaagcgctgcataaccattacacccagaagtcgctctcgctttcgccgggtaag

SEQ ID NO: 15616 - DNA, 1149 bp, synthetic construct
  misc_feature 1..1149: note = source = /note="Description of Artificial Sequence: Synthetic coding sequence"
  source 1..1149: mol_type = other DNA
atgggtgtgctgctaacccagaggaccctgctctccctggtgctggcactcctctttccaagcatggcatccatggcaatgcatgtagcccagcctgcagtagtcctggctagcagcaggggaatagcttcattcgtttgcgagtatgccagtccaggtaaggcaaccgaagttagagtgactgtgctgagacaggctgactcacaggtgacggaagtgtgtgccgctacatacatgatgggcaatgagttgacgtttctggacgatagtatctgcacagggacatcatccggcaatcaggtgaacctcactatacagggtctgagagccatggataccggtttgtatatttgtaaggtggaactcatgtatccccccccttactatctggggattggtaacgggactcagatctatgttatcgatcccgagccttgccccgattcggatcaggaaccaaaatcttcggacaaaacccatacctctcccccctctcccgcacctgaactgctcggcggcagcagcgtattcctctttccccctaagcctaaagatactctgatgatcagccggactcccgaggtgacttgcgttgtggtggatgtatcccatgaggaccccgaggtaaaattcaactggtatgtcgacggggtggaggtgcacaacgccaaaacgaagccacgggaggaacagtacaacagcacttaccgggtggtttcggtgctcactgtcctgcatcaggattggctaaacgggaaagaatacaaatgtaaggtgagtaataaggcactccctgcgcctattgagaagaccatctccaaggccaagggccaaccacgcgagcctcaggtgtacactctgcctccaagccgcgacgagctaaccaaaaatcaagtgtcgctgacatgcttggttaaaggattctatccgtccgacatagcagtcgagtgggaaagcaacggtcagcctgaaaacaattacaagaccacccctccagtgctggatagtgacggaagtttctttctgtacagcaagttaacggttgacaaaagccgatggcagcaggggaacgtgttttcctgtagtgtgatgcacgaagccttgcataatcattatacccaaaagtctctgtcactgagtccagggaag

SEQ ID NO: 15617 - DNA, 1149 bp, synthetic construct
  misc_feature 1..1149: note = source = /note="Description of Artificial Sequence: Synthetic coding sequence"
  source 1..1149: mol_type = other DNA
atgggagtgctgctgactcaaaggacgcttcttagcctggtcctggcgcttctctttccctcgatggcctccatggctatgcatgtggcccagcctgcggtggtgcttgcctcctcgaggggcattgcatcatttgtctgcgagtacgcatcgcctggaaaggcaaccgaagtgcgggtcacggtgctcagacaggcggactcgcaggtcactgaagtgtgcgcagcaacctacatgatgggtaatgaattgactttcctggatgattcaatctgtactggtacctcgagcggaaatcaagtgaatcttaccatccagggactgagagccatggataccggtctgtacatttgtaaagttgaacttatgtacccacctccctactacttgggtattggcaatggaactcaaatctacgtgatcgacccagaaccttgcccagacagcgatcaagagcccaagtcctcagataagacccatacttccccaccatcgccagccccggaactgctgggaggttcctcagtgttcttgtttcctccaaagcctaaggacacccttatgatttcacgcactcctgaagtcacctgtgtggtggtggacgtcagccatgaagatcctgaagtgaagtttaactggtacgtggacggagtggaagtgcacaacgcaaagaccaagcctagggaggagcagtacaactcgacgtacagagtggtgtcggtgcttaccgtgcttcaccaggactggctcaacggaaaggaatacaaatgtaaggtcagtaataaggccctcccagcccctatcgagaaaactatctccaaggcgaaaggccagcctcgcgagccacaagtgtacaccctcccaccctcgagagatgaactgactaagaatcaggtatcccttacgtgcctggtcaaaggattttacccctccgacatcgcagtcgagtgggagtctaacgggcagccggagaataactacaagactacgcccccagtgctggattcggacggctcattctttctctatagcaagctgactgtcgacaagagccgctggcaacagggaaacgtgttctcctgctctgtgatgcatgaagcacttcataaccattacactcagaaatcgctttcactttcccctggcaag

SEQ ID NO: 15618 - DNA, 1149 bp, synthetic construct
  misc_feature 1..1149: note = source = /note="Description of Artificial Sequence: Synthetic coding sequence"
  source 1..1149: mol_type = other DNA
atgggagttctgctcacccagcgcacactgctgagcctcgtcctggccctgctgttcccatctatggcatcgatggccatgcacgtagcgcaaccggctgtcgtgctggcctcctcgaggggtatcgcctcttttgtgtgcgaatacgcatcacctgggaaagccacagaggtgcgggtcaccgtccttcggcaagcggattcacaagtgaccgaggtctgcgccgccacatacatgatgggaaacgaacttaccttcctcgacgattccatctgcactggaacaagtagtgggaaccaggtgaacctgacaatacagggtctgcgggcgatggatacgggcctctacatatgtaaggttgagctgatgtaccccccaccctattacctaggtatcggaaatgggacacaaatatacgtcattgatccagagccttgtccagactcagatcaggaacctaagtcctccgacaaaacccacactagccccccttcccctgctccagagcttctgggggggtcctccgtgtttttgttcccccctaagccgaaggatacactcatgatctctcggacgcccgaagtgacatgtgtcgtggtagacgtgagccacgaggatccagaggtaaagttcaactggtacgtggatggggtggaagtacataatgctaagacaaaaccaagggaggaacagtacaacagcacataccgagtggtctcggtcctgacagtgctccaccaagattggctgaatggcaaggagtacaagtgcaaagtgtctaacaaagctcttcccgccccaattgagaagaccatttctaaagcgaagggacagccgcgagagcctcaggtctacaccttaccaccatctcgagatgagctgaccaagaaccaagtctcccttacctgtctcgtgaagggattttacccaagtgacattgcagttgagtgggaaagtaatgggcagcccgagaacaattacaaaaccactcccccagtgctggattccgatggtagtttcttcctgtactcgaagttgaccgtggataagtctcggtggcagcaaggaaacgtgtttagttgttctgtcatgcacgaagctctccataaccattacacacagaagagcctgagccttagccccgggaag

SEQ ID NO: 15619 - DNA, 1149 bp, synthetic construct
  misc_feature 1..1149: note = source = /note="Description of Artificial Sequence: Synthetic coding sequence"
  source 1..1149: mol_type = other DNA
atgggtgtgctgctgacccagaggaccctcctgtccctcgtgctcgctttgctgtttcctagtatggcttctatggcgatgcatgtggcccaacccgcagtggttctcgcctcaagccgagggattgcctcttttgtgtgtgagtatgcctctccgggtaaggctactgaggtgagagttaccgtactgcggcaggccgattcccaggtgacagaagtttgtgcagctacttacatgatgggaaacgaattgacttttttggacgactctatttgtaccggcacatcttccgggaaccaggtgaacctcacaatacagggcctgagggcaatggatacaggtctgtacatctgtaaagtcgagctaatgtaccctccgccctactaccttggcattggaaatggcacccagatttacgtaatcgacccagaaccatgcccagatagcgatcaggaaccaaagagctctgataaaacccacacttctcccccaagcccagcgcctgagttgctaggtggaagctcagtctttctcttcccgcccaagcccaaggacacactaatgatttcaaggacaccagaagttacatgtgtagtcgttgacgtgtcccacgaggatcccgaagttaagtttaactggtatgtcgacggggttgaagtccataatgccaagacgaaaccacgagaggagcagtacaacagcacgtatcgggtcgtgtccgtgctcactgtcctgcaccaggattggctcaacgggaaggagtataaatgtaaagtatccaataaggccctccctgccccaatcgagaagaccatttccaaagctaaaggtcagccccgtgagcctcaggtctacacccttccgccatcaagggacgaactgacaaagaatcaggtttcccttacatgcctagtaaaaggcttctaccccagcgatatcgccgttgagtgggagtccaacggtcagcccgaaaacaattacaagacaacccctcctgtgctagactccgacgggagctttttcctgtacagtaaactgaccgttgataaaagccggtggcagcagggcaatgtcttttcctgctcagttatgcacgaggctctgcacaaccactacacccagaagtcgctttctctgtctcccggcaaa

SEQ ID NO: 15620 - DNA, 1149 bp, synthetic construct
  misc_feature 1..1149: note = source = /note="Description of Artificial Sequence: Synthetic coding sequence"
  source 1..1149: mol_type = other DNA
atgggagtactgttgacacagcgaacgttgctttctctggtattagccctcctatttccttcaatggcatcaatggctatgcatgtcgcgcagcccgccgtggtcctggctagcagccgcgggattgcgtccttcgtgtgtgagtacgctagtcccggcaaagccaccgaagtgcgggtaaccgtccttcggcaagcggattcccaggtgactgaggtctgtgctgctacttacatgatgggcaatgagctcaccttcctcgacgattcaatttgtactgggaccagttcgggtaaccaagtgaacctaactattcagggcctgcgcgctatggatacagggctttatatttgcaaggtagagctgatgtaccctcccccgtattacctggggatcggaaatggcacacagatttacgtgatagatccggagccttgtcccgatagtgatcaagaacccaagagttcggacaaaacacatacttcaccaccttcgcccgcccccgaactccttggcggcagttcagtattcctgttcccacctaagcctaaggatacacttatgataagcaggacgcctgaggtgacctgtgtcgtggttgatgtgagtcacgaggatccagaggtcaaatttaattggtacgttgatggcgtggaagtacataacgcaaaaacaaaacccagagaggagcagtacaacagcacatatcgcgtagtgagcgtgttgacggtactgcaccaggattggctgaacggcaaggagtacaagtgtaaggtgtccaataaggcattgcccgcccccatcgaaaaaacaatttccaaagctaaggggcagccacgagaacctcaagtgtacaccctgccgccttcccgggatgagctgaccaaaaaccaggtgagcctgacgtgcctggtgaagggcttttatccctctgacatcgcagtcgagtgggagagtaatggacagccagagaacaactacaagacaacccccccagtgctggacagtgatggctctttcttcctttactccaagctcaccgtcgataagtcaaggtggcagcagggaaacgtgtttagttgctcagtcatgcacgaggctctgcataaccattacacccagaaaagcctctctctcagtccaggaaag

SEQ ID NO: 15621 - DNA, 1149 bp, synthetic construct
  misc_feature 1..1149: note = source = /note="Description of Artificial Sequence: Synthetic coding sequence"
  source 1..1149: mol_type = other DNA
atgggcgtactgctgacacagaggaccctcctctccctggttctagcgcttcttttcccttccatggcttccatggcaatgcacgtcgcccagcccgcagtcgtgctggccagttcacgtgggatagctagttttgtgtgcgaatacgcttcccccggtaaggctaccgaagtgagggtgaccgtgctgcgccaggccgactctcaagtaacggaggtctgcgcagcaacttatatgatgggaaacgagctcacattcctggatgatagtatttgcaccgggacatcgtccgggaaccaagtgaacttgaccatacagggactgcgcgcaatggacacaggcctctacatttgtaaggtggagctaatgtaccccccaccttattatctggggatcggcaatggcacgcagatttatgtaatcgaccctgagccgtgcccggactctgaccaggaaccgaagagctccgataagacccatacctcccctccctccccagccccagaacttctgggcggctcgtcagttttcctgttcccgccaaagcctaaagacacattaatgatctctagaacccccgaggtgacgtgcgtcgtagtggatgtctctcacgaggaccccgaggtgaaattcaattggtacgtggatggcgtggaggtccacaatgccaagaccaaacctcgcgaggaacagtacaatagtacctatcgagtggtttccgtgttaaccgtcttgcaccaggactggttaaacggtaaggaatacaagtgcaaggtttccaataaggctttgccagcaccgattgaaaagacgatttcaaaggcaaagggccagccccgcgagcctcaggtgtacacactgccacccagccgcgatgaactcaccaaaaaccaagtcagcctgacatgtcttgtcaagggtttctatccaagcgatatcgccgtggagtgggaatccaacgggcagcctgaaaacaactataagaccactccacctgtactggattctgacggctcattcttcttgtactctaaactcacagttgacaaatcacggtggcagcaaggcaatgtattttcctgtagcgtgatgcatgaggcattgcacaatcattacacccagaagtcattgtctctgtcgccggggaag

SEQ ID NO: 15622 - DNA, 1149 bp, synthetic construct
  misc_feature 1..1149: note = source = /note="Description of Artificial Sequence: Synthetic coding sequence"
  source 1..1149: mol_type = other DNA
atgggcgtgcttcttactcaacggacgcttctgtcacttgttctggcactgcttttcccgtccatggcatccatggcaatgcatgttgcacagcctgccgtggtgttggcctcatcacgaggcattgcctccttcgtgtgtgaatacgcttcgcctggcaaggcaactgaagtgagggtgaccgtgcttagacaagcagattcccaagtgacggaagtctgtgcggcaacttacatgatgggcaatgaacttacgtttctggatgacagcatctgtactggtacgtcatcgggcaaccaggtgaatcttaccattcagggactcagggcgatggataccggtctgtacatatgcaaggtggaacttatgtacccaccgccatactacctggggattgggaacggtactcagatttatgtgatagacccagagccttgccccgattctgatcaagaacctaagagcagcgacaagactcacacctcgccccctagccccgcccctgagctccttggaggttccagcgtgttcctttttcctccaaaacccaaggataccctgatgataagcagaacgccagaggtcacctgtgtggtggtggacgtgtcccatgaggacccagaagtcaagttcaactggtacgttgacggtgtggaagtgcacaacgcgaaaaccaagcctagagaggaacagtacaactctacctaccgcgtggtgagtgtgctgaccgtgcttcatcaagattggctcaacgggaaggaatacaagtgcaaggtgagcaacaaggcccttccagcacccattgagaaaactatctcgaaagcaaagggacagccacgcgaacctcaagtttatactctccctccttcgcgcgacgaacttacgaaaaaccaagtgtcactgacttgcctggtgaagggtttctacccttcggatatagcagttgaatgggaaagcaatggacagcctgaaaacaactacaagaccactcctccagtgctggattcggatgggagcttttttctgtactccaagctgactgtggacaagtcgcgttggcaacaaggaaatgtgttttcgtgttcggtgatgcacgaagcactccataatcattacacccaaaagtccctcagcctgtccccgggaaag

SEQ ID NO: 15623 - DNA, 1149 bp, synthetic construct
  misc_feature 1..1149: note = source = /note="Description of Artificial Sequence: Synthetic coding sequence"
  source 1..1149: mol_type = other DNA
atgggagtgctgctgacccaacgaactctgctcagtctggtgctggccctgctgtttccatcaatggccagcatggcgatgcacgtcgctcagccagcggtcgttctcgctagctctcgcggcatcgctagcttcgtctgcgagtatgcctcaccgggaaaggcgacggaggtgcgggtcactgtgctgaggcaagccgactcgcaagtgaccgaagtttgcgcggccacctacatgatgggtaatgagctcactttcctcgacgattccatttgcactggcacttcgagcgggaaccaggtgaatctcactatccagggacttcgggcaatggataccgggctgtacatctgcaaggtggaactgatgtacccccctccttactacctcggaatcggaaatggcactcagatctacgtgatcgaccctgagccatgtccagattcagatcaagagccaaagtcatcggacaagacccacaccagcccgccgtcgcctgcgccggaactgctgggcggctcatcagtctttctgttcccaccgaagccgaaggacactctgatgatttcgagaaccccggaggtgacttgtgtggtggtggacgtgtcccacgaagatccagaagtgaaattcaactggtatgtggatggtgtggaagtgcacaatgccaagacgaagccacgggaagaacaatacaattcgacctatcgcgtcgtgagcgtgttgaccgtgcttcaccaggactggctgaatggcaaagaatacaagtgcaaagtgtccaataaggccctgccagctccaatcgagaaaaccatctccaaagctaagggccaaccgcgggagccacaggtgtataccctcccgccttcgcgggacgagctgaccaagaatcaagtctccctgacttgtctggtgaagggattctacccgtccgacattgctgttgagtgggaatcgaacggacaaccagagaacaactacaaaactactccgccggtgctggattcagacggatcgttcttcctttactccaaactgaccgtcgataaatcgagatggcagcagggcaacgtgttctcctgttcggtgatgcacgaagcactgcataatcattacacccaaaagagcctttcgctctcgccgggcaag

SEQ ID NO: 15624 - DNA, 1149 bp, synthetic construct
  misc_feature 1..1149: note = source = /note="Description of Artificial Sequence: Synthetic coding sequence"
  source 1..1149: mol_type = other DNA
atgggagtgctcctcactcagcgtaccctcctttcgttagttctggcacttcttttcccctccatggccagcatggctatgcacgtcgctcagccagcggttgtgctggcgagtagtagggggattgctagcttcgtttgcgagtatgcatctcctggcaaggcgaccgaagtgcgggtcaccgttcttcggcaagctgactctcaagtgactgaagtatgcgcagccacatatatgatgggaaacgagttgacctttctagatgacagcatctgcacagggaccagctccggcaaccaggtcaatctgaccattcaaggacttcgagccatggatacaggcctgtacatctgtaaggtggaattgatgtatcctcccccatactatttaggaatcggaaatgggacccaaatatacgtcatcgatccggaaccatgccctgacagcgatcaggagcctaagtcctcagacaaaacacatacttctccaccctcgcctgcaccagaactgctcggaggttcctcggtctttctcttcccccccaaacctaaggatacgctgatgatatctcgcacccctgaggtcacctgcgtggtcgtagatgtctcccacgaggatcccgaagtcaaattcaactggtatgtggacggggtggaagtgcacaatgccaaaacgaaaccgcgtgaggagcagtacaattccacatatagagttgtgtccgtgttgaccgtgcttcatcaagactggctcaacggaaaggaatacaaatgcaaggtcagcaacaaagcattaccggccccaatcgagaaaaccatctccaaggcaaaagggcagcccagagaacctcaggtttataccctcccacctagcagggacgagttaacgaaaaaccaggtatcgctgacttgtctggtcaagggtttctaccccagtgatatagctgttgagtgggaatctaacggccagcccgaaaataattacaagaccacaccccctgttctcgattcagatggaagtttcttcctctactccaaactgactgtggataaatctcggtggcagcaggggaatgtgttcagctgctcagtcatgcatgaggcgctgcacaatcattacacccagaagtctctgtcccttagccctgggaag

SEQ ID NO: 15625 - DNA, 1149 bp, synthetic construct
  misc_feature 1..1149: note = source = /note="Description of Artificial Sequence: Synthetic coding sequence"
  source 1..1149: mol_type = other DNA
atgggggtcctccttactcaacggacgctgttgtccctcgtgcttgcgctcctttttccatctatggcatccatggcaatgcacgtggcacaacctgctgtcgtcctggcgtcctcacgtgggatcgcatcctttgtctgcgagtatgcctcccctgggaaagcaaccgaggtcagagtgaccgtgcttaggcaggctgattcgcaagtgacggaagtgtgtgcggcgacctacatgatgggaaacgaacttactttccttgatgatagcatttgtaccggaacttcatcgggtaaccaagtgaacctcaccatccagggcctgagggcaatggataccggactttacatctgtaaggtcgaattgatgtaccccccaccttactatctgggcattggaaacggtactcagatttacgtcattgatcccgagccatgtcccgattcagatcaagaacctaaatccagcgataagacccatacgtcccctccttccccagccccagaattgcttggtggctcgagcgtgttcctcttcccgcccaagcccaaggacaccctgatgatcagccgtacgcctgaggtgacctgtgtggtggtggacgtgagccacgaagatccagaggtgaagttcaattggtacgtggatggagtggaggttcacaatgcaaagaccaagccaagagaggagcagtataactcaacgtacagagtggtgtcggtcctgactgtgcttcatcaagattggctcaacggaaaggaatacaaatgcaaagtgtcaaacaaggcgctgcctgcgcctatagaaaagaccatttcaaaggcaaagggacagccaagggaacctcaagtctacactctgcctccttccagagatgaactgaccaaaaatcaagtgagcttgacctgtctcgtcaagggcttttacccttccgatatcgcagtggaatgggaatcgaatggtcaacccgagaacaactacaaaactaccccaccggtcctcgactcagatggatcgttttttctctactcaaaacttaccgtcgataaatcaagatggcaacagggcaacgtattctcatgttcggtgatgcatgaggcccttcataatcattacacgcaaaagtcgttgtccctttccccaggaaag

SEQ ID NO: 15626 - DNA, 1149 bp, synthetic construct
  misc_feature 1..1149: note = source = /note="Description of Artificial Sequence: Synthetic coding sequence"
  source 1..1149: mol_type = other DNA
atgggggtcctgctgacccagagaaccctcctttccctggtgctcgcgttgctgtttccatccatggcgtccatggccatgcacgtcgcacagcctgccgtggtcctcgcctcgtcccgcgggattgcctcgtttgtgtgtgaatacgcttcacctggcaaggcaaccgaagtgcgggttactgtgctccggcaagccgattcgcaagtcaccgaagtctgcgctgctacttacatgatgggaaatgaactgaccttcctggacgattctatttgcacgggtacctcgtcaggaaaccaagtcaaccttaccatccaggggcttcgggcaatggacaccggtctttacatttgcaaggtggaactgatgtacccacctccttactaccttggaattggtaacggtacgcaaatctacgtgattgatcctgaaccttgcccagattccgaccaagaaccgaagtctagcgataaaacccacaccagccctccatccccagcgccagaactgctcggagggagctccgtgttcctgttccctccgaagcctaaagacaccctgatgataagccggacccctgaagtgacgtgtgtggtggtggatgtctcgcatgaggaccccgaagtgaaattcaattggtacgtggatggggtggaagtgcataacgccaaaaccaagcctagagaggagcaatacaactcaacctacagagtcgtctcagtgctcacggtgctccatcaagattggttgaatggaaaggaatacaaatgcaaagtctcaaacaaggcacttcccgctcctattgaaaagacgatttccaaagcaaagggtcaaccaagagagcctcaagtgtacactcttcccccatcgagagatgaattgactaaaaaccaagttagtcttacctgcctcgttaaaggtttttacccatcagacatcgccgtggagtgggaatcgaacggccagcccgaaaacaattacaagactaccccgcccgtgctcgattcggatggatccttctttctctattcaaaacttactgtggataaaagcaggtggcaacaggggaatgtgttttcgtgttcggtgatgcatgaggcactccataatcattacacccaaaagtccctttcgctgtcaccaggaaag

SEQ ID NO: 15627 - DNA, 1149 bp, synthetic construct
  misc_feature 1..1149: note = source = /note="Description of Artificial Sequence: Synthetic coding sequence"
  source 1..1149: mol_type = other DNA
atgggcgtgctcctgacacagcgtaccttgttgagcctggtgctggcactgctatttccgagtatggcttccatggcaatgcatgtggcccagccagcagtggtgttggcaagctcgcggggcatcgcgtcgtttgtgtgtgagtacgcttccccaggaaaggccaccgaagtacgagtaaccgtgctgcgacaggctgactcgcaagtgaccgaagtgtgtgccgctacgtacatgatgggaaatgagttgacctttcttgacgactcgatctgcactggtacctctagcggtaaccaagtgaatctgactatccagggtctacgtgcaatggatacgggtctgtacatctgcaaggtggaactcatgtatcccccaccatattacctgggaatagggaatggaacccagatttacgtcattgaccccgagccctgcccggattcggaccaggagcccaagagtagcgacaagacgcataccagcccaccatcgcccgccccagaattgctgggcggcagtagtgtgttcctgtttcctccgaaacccaaggataccttgatgatctcccgcacccccgaagtgacgtgcgtggtagtggatgttagtcatgaggatccggaggtgaaattcaactggtacgtcgatggcgtggaggtgcacaacgcaaagacgaagccacgagaggaacaatataattccacatacagggtggtgtcagtgctgaccgttttacaccaggattggctcaacggcaaagagtataaatgcaaggtcagcaacaaggcactgccagcccctatcgagaagacgatctcgaaggcaaagggtcaaccacgagaaccgcaggtctacacactaccaccgtcacgagacgaactgacaaagaatcaggtgagccttacctgtttggtgaagggcttttatcctagcgacatcgccgtggagtgggagagcaacggccagcccgagaacaactataagacaacaccgcctgttctcgattcggacggctcgttcttcttgtattccaaattgaccgtggacaagagcaggtggcaacaagggaatgtcttttcgtgctcggttatgcacgaggccctccataaccactacacccaaaagtctttgtcccttagccccggaaag

SEQ ID NO: 15628 - DNA, 1149 bp, synthetic construct
  misc_feature 1..1149: note = source = /note="Description of Artificial Sequence: Synthetic coding sequence"
  source 1..1149: mol_type = other DNA
atgggtgttttgctaacacagcggacgctattgtctctggtgctcgctttgctgttcccctctatggccagcatggctatgcacgtagcccagcccgcggttgtgctagcttctagtagggggattgcttcattcgtgtgtgaatatgcatcacccggcaaagccaccgaggttcgagtcaccgtacttcgccaagctgactcacaagtgaccgaagtgtgtgccgccacctacatgatggggaatgaactgacattcttggacgatagtatctgtactgggacaagctcagggaaccaagtgaatttgaccattcaagggctcagggcaatggacacaggtctgtatatttgtaaggtagagctgatgtatcctcctccgtactacctcggtatcggaaacggaacacaaatatacgttattgatcctgagccatgccctgactcagatcaggagcccaagtctagtgataagacgcatacctcaccaccttcgcccgctccagagcttctcggcggcagttctgtttttctgttccctcccaaaccgaaggatactctaatgatcagccggactccagaggtgacttgtgtggtggttgatgtcagtcacgaagacccagaagtaaagttcaattggtacgtggacggcgtggaagtgcataatgcgaagacgaaacctcgcgaggagcagtataacagcacataccgcgtggtctcggtgctgaccgtgctgcaccaggactggctgaatggcaaagaatataagtgcaaggtgtctaacaaagcgctgccagctcctatagagaaaaccataagcaaggcaaaagggcagccaagagagccacaggtttacactcttcctccaagcagagatgaactgaccaagaatcaggtgtcacttacctgcctggttaagggtttctacccatctgacatcgccgtagaatgggagagcaatggtcagcccgagaataattacaagactactccccccgtgctggactcagatgggtcattttttctgtattccaagctgaccgtggacaaatctcggtggcagcaggggaatgtgttctcgtgttctgttatgcatgaggcactgcacaaccattacactcagaaatcgctatccttgtctcctgggaag

SEQ ID NO: 15629 - DNA, 1149 bp, synthetic construct
  misc_feature 1..1149: note = source = /note="Description of Artificial Sequence: Synthetic coding sequence"
  source 1..1149: mol_type = other DNA
atgggtgtgctcctcacacaacgcacacttctttccctggtcctagccttgctgtttcctagcatggcttctatggcaatgcacgttgcgcagccagccgtagtgctcgcctcctcgaggggtatcgcttcgttcgtgtgcgaatatgccagtcctgggaaagcaaccgaggtgcgggtgacagtactcagacaggccgactctcaagtcacggaggtgtgcgccgccacctacatgatgggcaacgagctgacatttctggacgactctatttgtactggtacaagctcgggtaatcaggtcaacttaacaatccagggacttcgagccatggacaccggcctgtatatttgcaaggtcgagttgatgtatccgccaccatattacctggggatagggaatggcactcaaatatatgtgattgatccagaaccgtgtcccgactccgaccaggagcctaaatcctctgataaaacccacacctccccaccttcgccagcccccgaattgttagggggcagttctgtgtttttgtttccccccaaacctaaggacactctgatgatttcgcgcacaccagaggtgacatgtgttgtggtggacgtgagccacgaggatccagaggtcaagtttaattggtacgtggatggagtggaagtgcataacgccaaaactaaacccagagaggagcagtataactccacttaccgggtggtcagcgtcctgactgtgctgcaccaggactggctgaatgggaaggagtacaaatgtaaggtaagcaataaggctttacccgcccccatcgagaagacgataagtaaggccaaggggcagccacgagaaccccaggtatacacactccccccaagtagagacgaactgacgaaaaaccaggtctcactgacctgcctggtcaagggcttttatccaagcgacatcgccgtcgagtgggagagtaacggccagcccgagaataactataaaacaactccacctgttctggatagtgacggctccttcttcctgtactcaaagctgactgtagataagtcccggtggcagcagggcaatgtgttcagttgctctgttatgcacgaggcgctgcacaatcattatacccagaagagcctgtcactctcccccggcaag

SEQ ID NO: 15630 - DNA, 1149 bp, synthetic construct
  misc_feature 1..1149: note = source = /note="Description of Artificial Sequence: Synthetic coding sequence"
  source 1..1149: mol_type = other DNA
atgggcgtgctgctgacccagcgcacactgttgtcactggtcctggccttactgttccctagtatggccagtatggccatgcacgtagcacaacccgctgtcgtactggcatcttcacgtggtatagcctcttttgtatgtgagtacgcgagtccagggaaggctaccgaggtacgcgtaacagtgctgcgtcaggccgactcccaggtaaccgaagtctgcgccgccacgtacatgatgggtaatgaactaactttcctcgatgattccatctgtacaggcacaagttctggcaatcaggtgaacctgactatacaggggcttcgcgctatggatactggcctctatatttgtaaggtcgagctgatgtaccctcctccttactacctggggatcggcaacggaacacaaatctatgtgatcgatccggaaccctgccctgattccgatcaagaacccaaatcaagtgacaagacacacacctctccccccagccctgccccggaactgctgggcggtagctctgtcttcctgttcccgcctaagcccaaagacaccctgatgatttccaggacgcccgaggtgacctgcgtggttgtggacgtctcacacgaagatccggaggttaagtttaactggtacgtcgacggcgtcgaggtgcataacgcaaagactaaacccagagaggagcagtacaacagcacgtatagggtggtttctgtgctgactgtgttgcaccaggactggcttaacggtaaagaatataaatgcaaagtcagcaataaggcccttccagcccctattgaaaagaccatttccaaggctaaggggcagccaagggaacctcaagtgtataccctgcctcctagtcgcgacgagctcactaagaatcaagttagtctgacttgcctagtgaaagggttctatccaagtgatatcgccgtggagtgggagtccaacggccagcctgagaataactataagacaaccccccccgtgttggactccgatggatccttttttctgtactccaagctgactgtcgacaagtctagatggcagcagggcaatgtgttttcttgctctgtcatgcacgaggccctgcataaccactatacgcagaaatcattatcattgtcccccggcaag

SEQ ID NO: 15631 - DNA, 1149 bp, synthetic construct
  misc_feature 1..1149: note = source = /note="Description of Artificial Sequence: Synthetic coding sequence"
  source 1..1149: mol_type = other DNA
atgggagtgctgctgacccaaagaactctgctcagcctcgtgttggcacttctcttccccagcatggcatcgatggcgatgcacgtcgctcaaccggcggtcgtcctcgcctcgtccagagggatcgcatcctttgtgtgcgaatacgcgagcccgggaaaggccaccgaagttcgcgttacggtcctgcggcaggccgattcgcaagtaactgaggtctgcgcggccacctacatgatgggcaatgagctgaccttccttgatgacagcatctgcaccggaacgtcgtccggaaatcaggtgaacctgaccatccaagggctgagggccatggatactggattgtacatttgcaaagtggagcttatgtacccgcctccatactacctgggcattggtaacggaacccagatctacgtgatcgatccagagccatgtccagactccgaccaggaaccgaagtcatcagataagacccatacttctccgccgtcgccggccccagagcttctgggagggtcgtcagtgttcctcttcccaccaaagcctaaagacaccctgatgatctcaagaactccggaagtgacctgcgtggttgtggatgtatctcatgaggacccggaagtcaagttcaattggtatgtcgacggagttgaggtgcataatgccaaaactaagccgagggaagagcaatacaactctacctatcgggtggtatccgtgctcactgtgctgcaccaggactggctgaacggaaaggaatacaaatgcaaagtgtccaataaggcgctgccggcgccaatcgagaaaactatctcgaaagcaaaggggcagccgcgcgaaccacaggtctacactttgcccccatcccgggacgagctcactaaaaaccaggtgagcctcacctgtctggtgaagggattctacccttctgatatcgctgtggaatgggagagcaatgggcagcctgagaacaattacaagacgaccccacccgtcctcgactccgacggctcgttcttcctctattcaaagctcaccgtggacaagagccggtggcaacagggcaacgtcttttcgtgctcggtgatgcacgaagcgctgcacaatcactacacgcaaaagtcactttcgctgagcccgggtaag

SEQ ID NO: 15632 - DNA, 1149 bp, synthetic construct
  misc_feature 1..1149: note = source = /note="Description of Artificial Sequence: Synthetic coding sequence"
  source 1..1149: mol_type = other DNA
atgggagtcctcctgactcagcggacgctgttgtcgctggtgctcgcgctgctgtttccgtccatggcatccatggcgatgcacgtggcccagccagccgtggtcctggcatcctcgcggggcatcgcctcctttgtctgcgaatacgcgagccctggaaaggcgaccgaggtgcgggtcactgtcctccgccaggccgacagccaagtcaccgaggtctgcgcggccacttatatgatgggaaatgaactcactttccttgacgactcgatctgtactgggacttcatccgggaaccaggtgaacctgacgatccaaggtttgagggccatggacaccggcctctacatctgcaaggtggaactcatgtacccgccaccgtactacctcggtatcggaaacggtacccagatctacgtcatcgatcccgaaccttgccctgacagtgatcaggaaccgaaatcatcggataagacccatacgtcccctccttctccagcccccgagcttctcggtggatcctcggtgtttttgttcccgccgaaacccaaagacactctgatgatttcacggaccccggaagtgacttgcgtggtcgtcgacgtgagccacgaagatccggaggtcaagtttaattggtacgtggacggggtggaagtgcataatgccaaaactaaacccagagaggaacagtacaattcaacgtaccgggtggtttcagtcttgaccgtcctgcaccaggattggcttaacggaaaagagtacaagtgtaaagtgtcgaacaaggctcttccagcaccaattgagaagactatctccaaggcaaagggccaacctagagagccgcaagtttacaccctcccaccgagccgggatgaactgaccaaaaaccaagtctccctgacttgcctggtgaagggattctacccttcggacatcgccgtggaatgggagtcgaatggtcaaccggagaacaattacaaaaccaccccgccagtcttggactccgatggatccttcttcctctactcaaaattgaccgtggacaaatcacgctggcagcagggaaacgtgtttagctgttcagtgatgcacgaggcacttcataatcactatacccaaaaatcgctctccctgagccccggaaaa

SEQ ID NO: 15633 - DNA, 1149 bp, synthetic construct
  misc_feature 1..1149: note = source = /note="Description of Artificial Sequence: Synthetic coding sequence"
  source 1..1149: mol_type = other DNA
atgggtgtcctcttaacccagcggaccctgctttccttggtcctggctttgctgttccctagcatggccagtatggctatgcatgtggctcagccggctgtggtgttggccagcagtcgtggaatcgcatcattcgtgtgcgagtacgcatccccaggcaaagccacagaagtgagggttaccgtactacgtcaagccgattcacaagtaaccgaggtctgtgccgcgacttacatgatgggcaatgaactgacttttctggatgattcgatttgtacgggtacctccagtggaaaccaagtaaacttgacaatacagggcctgagagcgatggatactggtctctacatttgtaaagttgagctgatgtaccccccgccttattacctcggaatcggcaacggaacacagatctacgtgattgaccctgagccctgtccagatagcgatcaggagccaaagagtagcgataagacacacaccagtcccccttctccggcccccgagttactaggtggaagctccgtgttcctgtttccacccaagcccaaagatacactgatgatttctcgaacccccgaggtgacatgtgttgttgtcgatgtgtcccatgaagaccccgaggtaaagttcaactggtatgtcgacggtgtggaagtccataacgccaaaaccaaacctcgggaagaacaatacaattccacgtaccgcgtggtgagcgtcttgaccgtcttgcatcaggattggctcaacgggaaggaatataaatgcaaagtatctaataaggcacttccagcaccgattgagaaaacaatctctaaggccaagggtcagccacgagagcctcaggtgtatactcttcccccctctcgggatgaactgactaagaaccaggtgtcgctcacttgtcttgtgaaaggattttacccatccgatatcgccgtggagtgggaatctaatggccagccggaaaacaattacaaaactacgccccccgttctcgactccgacggcagttttttcctgtattcaaaactgaccgtagataaatccagatggcaacagggaaatgtgttttcctgtagtgtgatgcatgaggccctgcataaccattatacacagaagagcctcagcctgtctcccgggaag

SEQ ID NO: 15634 - DNA, 1149 bp, synthetic construct
  misc_feature 1..1149: note = source = /note="Description of Artificial Sequence: Synthetic coding sequence"
  source 1..1149: mol_type = other DNA
atgggtgtgctgctgactcaacggactctcctgtcactcgtcctcgccctcctgtttccatcaatggcgtcgatggccatgcatgtggctcagcctgcagtggttctggcgagctcccgcggcatcgcatccttcgtgtgcgaatacgcttccccgggaaaggccaccgaagtccgcgtgactgtcttgaggcaggcggattcacaggtgactgaagtctgtgccgctacctacatgatgggaaatgagctgaccttcctggatgattcaatctgtaccggcacttcatcggggaaccaagtgaacctcaccattcagggactccgagcgatggacactggactctacatctgcaaggtggagcttatgtatccaccgccttactacctgggcatcgggaatggcactcagatctacgtcatcgacccggagccgtgccccgatagcgaccaggaaccgaaatcctcggacaagacccacacctcgccgccatctccggcccccgagcttctgggagggagctccgtgtttctgttccctcctaagcccaaggataccttgatgatctcaagaacgccggaggtcacgtgcgtggtcgtggacgtgtcccacgaggaccctgaggtgaaattcaattggtacgtcgatggagtggaggtccacaacgcgaaaactaagccgagagaagaacagtacaactcgacttaccgggtggtgtcagtgctcaccgtgctgcaccaagactggctgaatggaaaggaatacaagtgcaaggtgtccaacaaagccttgccggcaccgatcgaaaagaccatttcgaaagccaaaggtcaacctcgggagccacaagtctatactctcccaccaagccgcgacgaactgaccaagaaccaggtgtcgctgacttgtctggtgaagggcttctacccaagcgacatcgccgttgaatgggagtccaatggacagccggaaaacaactacaagacgacgccgcccgtgctggactcggatggatccttcttcctgtactccaagttgaccgtggacaagtcgcgctggcagcaaggtaatgtctttagctgctcggtaatgcatgaagcacttcataaccactacacccagaaaagtctcagccttagcccaggaaag

SEQ ID NO: 15635 - DNA, 1149 bp, synthetic construct
  misc_feature 1..1149: note = source = /note="Description of Artificial Sequence: Synthetic coding sequence"
  source 1..1149: mol_type = other DNA
atgggtgtcttgctcactcagcgtactttgctgtcactcgttttggccctgctgttccccagcatggcttcaatggccatgcatgtcgcccaaccagctgtcgtcctcgcgtcaagccggggcatcgcctcgttcgtttgtgaatacgcaagtcctggcaaggcaacagaagttcgagtgactgtcctccgacaggccgactcccaggtcaccgaggtctgtgcggcaacctacatgatgggaaacgagcttaccttcctcgatgattccatatgtaccgggacctcgtcgggcaaccaggtcaacctgacgatccagggtttgcgtgctatggacacaggactgtacatttgcaaggtcgaacttatgtatccccccccatactacctgggtatcggtaacggcactcagatctatgtaatcgatcccgagccttgccccgattccgaccaagaaccgaaatcgtccgacaagacgcacactagccctccttctcctgcgcccgaattgttgggtgggtcttcggtcttcctcttcccgcctaagcctaaggataccctgatgatctctcgtacgccagaggtcacatgcgtcgtcgtagacgtgtctcacgaggaccctgaggtgaagttcaactggtacgtagacggcgtcgaggtacataacgccaagaccaagccgcgcgaggagcagtataactctacttaccgtgtcgtttcggtgttgacggttctccaccaggattggcttaacggcaaggagtacaagtgtaaggtctccaataaggccctgccggcgcctatcgagaagactatctctaaagccaaagggcagcctcgtgagcctcaggtctacactctgcccccgagtcgcgatgagctgaccaagaaccaagtgtcgctaacctgtttggtgaagggtttctacccgtcggacatcgctgtggaatgggagtctaacggacaacctgagaacaattataagaccacccccccggtcctggattccgatggcagcttcttcttatactcaaagcttaccgtcgacaagagccggtggcaacagggtaacgtattctcgtgttcagtcatgcatgaggcactgcacaaccactacacccagaagtcactctcgctgtcccctggcaag

SEQ ID NO: 15636 - DNA, 1149 bp, synthetic construct
  misc_feature 1..1149: note = source = /note="Description of Artificial Sequence: Synthetic coding sequence"
  source 1..1149: mol_type = other DNA
atgggtgttctgcttacccaacgcaccctgcttagcctcgtgctggcgctgttgtttccttcaatggcatcaatggcgatgcatgtggcgcaaccagccgtggtgcttgcgtcctcgcgtggtatagcatcgttcgtttgtgaatacgcatcgccaggtaaggcgacggaagtgagagtgacggtgctgagacaggccgattcacaggtcaccgaggtgtgtgccgcaacttacatgatggggaacgagctgacctttttggatgattctatctgcaccggaacgagctcgggaaaccaggtcaatcttaccattcagggactgcgggcgatggacaccgggctgtatatctgcaaggtagagctgatgtacccacctccttactatctcggcataggaaacggcacccaaatctatgtgattgatccagagccatgtcctgactccgaccaagaacctaagtcatcggacaagacccatacctcgccaccgtctcccgccccagaactgctcggtggttcctcggtctttctttttcctccaaaacctaaggatactcttatgattagccgcacccctgaagtgacttgtgtcgtcgtggatgtctcgcatgaagatccggaagtgaaattcaattggtacgtggatggggttgaagtccacaatgcgaaaacgaaaccaagagaggaacaatacaattccacctacagagtggtgtcggtgctcactgtgctgcatcaggattggctcaacggcaaggaatacaaatgcaaggtcagtaacaaggcacttcctgcacctatcgaaaagacgattagcaaggctaagggacaacctcgggaacctcaagtgtacactcttcccccatcaagagatgagctgacgaaaaatcaagtgagccttacctgtcttgtcaagggattctacccttctgatattgcagtggagtgggaatcgaacggtcagccagagaacaactacaagactacccctcccgtgctggattcggacgggtccttctttctttactcaaaactgaccgtcgacaagtcaagatggcaacagggcaatgtcttttcatgttcggtgatgcatgaagcacttcataatcattatacccagaagtccctcagcctttcgcctggtaag

SEQ ID NO: 15637 - DNA, 1149 bp, synthetic construct
  misc_feature 1..1149: note = source = /note="Description of Artificial Sequence: Synthetic coding sequence"
  source 1..1149: mol_type = other DNA
atgggcgtgcttttgacgcagcggactttgctgtcacttgtgttggccctcctttttccttcgatggccagcatggccatgcacgttgcgcaacctgctgtcgtccttgcctctagtaggggaatcgcctctttcgtgtgcgaatacgcaagcccaggtaaggcaacagaagtccgggttactgttctgagacaagcggatagccaagttaccgaggtgtgtgcagcaacgtatatgatggggaacgagctcacctttttggatgactccatctgcactggaacgtctagtgggaaccaggtaaatttgaccatacagggtcttcgtgctatggacaccggactatacatctgcaaggttgaactcatgtacccacccccgtactatcttggtattggcaacggcacacaaatctacgtgatcgacccagaaccgtgccccgattcggaccaggagcctaaatcctcggataaaacccatacttccccaccatccccggctcctgaactgctgggagggtcgtccgtgttcttgtttccgccgaagcctaaagacacgttgatgatctcgcgtaccccggaagtcacttgcgttgtcgtcgacgtctcccacgaggatccagaagtgaagttcaactggtatgttgacggcgtcgaagtacacaacgccaaaacgaagccgcgggaagagcagtataattccacttatagggtagtttcagtgcttactgtcttgcatcaggactggctaaatgggaaagaatacaagtgcaaggtctcaaacaaggctctgcctgctccgatcgagaagactatcagcaaggcaaagggtcagcctcgcgaaccgcaagtttacacgctcccaccttctagagacgagctcactaagaatcaggtttcacttacatgcttggtcaagggattttatcccagtgacatcgctgtggaatgggaatcgaacggacagcccgagaacaactacaagaccacgccccccgtcctcgattctgatggatcattctttctatatagcaagttgaccgtggataagtctcgttggcagcaaggtaatgtgttctcttgttccgttatgcatgaagcacttcacaaccattacacccaaaaaagtctgtcactttcgccaggaaag

SEQ ID NO: 15638 - DNA, 1149 bp, synthetic construct
  misc_feature 1..1149: note = source = /note="Description of Artificial Sequence: Synthetic coding sequence"
  source 1..1149: mol_type = other DNA
atgggggtcctgctgacgcagcgcaccctcctgtcactggtcctggccctcctgttcccttcgatggcgtccatggccatgcatgtggcacagcccgcggtggtcctggcctcgtccagggggatcgcctcctttgtgtgtgagtacgcctccccaggaaaggccactgaggtgcgcgtcactgtcctgagacaggcagattctcaagtgaccgaagtctgtgccgcgacttatatgatgggaaacgagctgaccttcctcgacgatagcatctgcactggcacttcctcaggaaaccaagtgaatctcaccatccaaggcctcagggccatggataccggtctgtacatttgcaaggtcgaattgatgtacccaccgccgtactacctgggcattggaaatggaacccagatttatgtgatcgatcctgaaccctgcccggattcagaccaggagccgaaatcctcggacaaaacgcacacctcgccgccttcgccggcgcctgaactgcttggtggaagctccgttttcctgttcccgccgaagccaaaggacaccctgatgatctcgcggacgcccgaggtcacttgcgttgtggtggacgtgtcccacgaggaccctgaggttaagtttaactggtacgtggatggagtggaggtgcataacgctaagaccaaaccaagagaggaacagtacaattccacttaccgcgtggtcagcgtgctcactgtgctgcatcaagactggctcaacggtaaggaatacaaatgcaaggtgtcaaacaaggcactccctgctccgattgaaaaaaccattagcaaagctaaaggccagccacgggaacctcaagtctacaccctcccaccgtcgcgggatgaattgaccaaaaaccaggtgtccctgacttgtctggtgaagggtttctatccatcggacatcgccgtcgaatgggaatcaaacggccagccggagaacaactacaaaactactccgccggtcttggatagcgatggctcgttctttctctacagcaaacttaccgtggacaagtcccggtggcagcaggggaatgtgttcagctgctccgtcatgcatgaggctctgcacaaccattacacgcaaaagagcctgtccctgagcccgggaaaa

SEQ ID NO: 15639 - DNA, 1149 bp, synthetic construct
  misc_feature 1..1149: note = source = /note="Description of Artificial Sequence: Synthetic coding sequence"
  source 1..1149: mol_type = other DNA
atgggtgtgcttcttacccaaaggactcttctctccctggtgctcgcccttctgtttccctccatggcctccatggcgatgcatgtcgcgcagccagcagtggtgcttgcatcgtcccgcggaattgcatcgtttgtgtgtgagtacgcatcgcctggtaaagcaaccgaggtgcgggtgaccgtgcttcggcaagcagatagccaagtgaccgaagtctgcgccgcaacttacatgatgggcaacgaactgacctttctggacgattcaatttgtaccggaacttcgtccggaaaccaggtgaatttgactatccaggggcttcgtgcgatggatactggcttgtatatctgcaaggtggaactcatgtaccccccaccatactacctgggaataggaaatggaacccagatttacgtgatagaccccgaaccttgtcccgactccgatcaagaaccaaagtccagcgacaagacccatacttctcccccaagcccagcacccgaactgcttggtgggtcgagcgtgttcctttttcctccaaaaccaaaggataccctgatgatctcgaggacccctgaagtcacgtgtgtggttgtggacgtctcccatgaggatccggaagtgaagtttaactggtacgtggacggagtggaggtccataacgcaaagaccaaaccacgagaggagcagtacaactcaacctaccgtgtcgtttcagtcctcacggtccttcatcaagattggcttaacggtaaggaatacaaatgtaaagtctcgaacaaggctcttcctgcgccaattgagaaaaccatctccaaggctaaggggcaacctagagagccacaagtctacaccctccctccttccagggatgagcttaccaagaatcaagtgtcgcttacttgcctggtgaaaggcttctacccgagcgatatcgcggtcgaatgggaatcgaacggtcagccagaaaacaactacaagaccaccccacctgtactggattcagacggtagcttttttctttactctaaactgacggtggataaatctaggtggcaacaaggtaacgttttctcttgttccgtcatgcatgaagctctgcataatcactacacccagaagagcctgtccctttcccctggaaag

SEQ ID NO: 15640 - DNA, 1149 bp, synthetic construct
  misc_feature 1..1149: note = source = /note="Description of Artificial Sequence: Synthetic coding sequence"
  source 1..1149: mol_type = other DNA
atgggcgtgctcctgactcaacggacgttgctgagcctcgtgttggccctgcttttcccgtcgatggcgtcaatggctatgcatgtcgcccaaccggccgtggtgctcgccagctcgcgcggcatcgcgtcgtttgtgtgcgagtacgcctcgcctgggaaggccactgaagtgagagtgacggtgttgaggcaggcggacagccaagtgactgaggtgtgcgcagcaacctacatgatgggaaatgagcttaccttcctggacgactccatctgcacgggtacttccagcggcaatcaggtcaacctgactatccagggattgcgcgctatggacaccggcctgtacatctgcaaagtggagctgatgtacccgcctccttactacctgggcatcgggaacggcacccagatctacgtgatcgatcctgaaccttgcccagattcggaccaagagcccaaatcctccgataaaactcataccagcccaccatccccggccccagagctgctgggcggcagctcggtgttcctgttccctccaaagccgaaggacaccctcatgatatcgagaacccctgaggtgacctgcgtggtggtggatgtctcacacgaggacccggaggtgaagttcaactggtacgtggacggggtggaagtgcataacgccaaaaccaagccgagagaagagcagtacaacagcacttacagagtcgtgagcgtgcttaccgtgctgcatcaggattggttgaacggaaaggaatacaagtgtaaggtcagcaacaaagctctcccagcccctatcgaaaaaactatttcgaaagctaagggacagccgcgcgaaccgcaggtgtatactttgcccccctcgcgggacgagctcaccaagaaccaggtgagcctgacttgcctggtgaaaggattctacccgtcggatattgcggttgaatgggagtccaatggacaaccagagaataactacaagactactccaccggtcctcgactctgatggttctttctttctctacagcaagctcactgtggacaaatctcggtggcagcaaggaaatgtcttttcgtgctcagtgatgcacgaggccctccacaaccactacactcagaagtcgctctcactgtcacctggaaag

SEQ ID NO: 15641 - DNA, 1149 bp, synthetic construct
  misc_feature 1..1149: note = source = /note="Description of Artificial Sequence: Synthetic coding sequence"
  source 1..1149: mol_type = other DNA
atgggagttctgcttacacaacgcactctgctaagcttggtcttggccttgttatttccatctatggcctccatggcgatgcacgtcgctcaacctgctgtcgttttggcatcgtcacggggcatcgcctcttttgtttgtgagtacgccagtcccggcaaagccacagaggtgcgtgtcaccgtgctgcgacaggcagattcccaggtcaccgaagtttgcgccgccacctatatgatgggcaatgagctgaccttccttgatgactcaatctgtacaggaacttctagcgggaatcaggttaacttgaccatccaagggctgagggcaatggatacaggactctatatttgtaaggtggagctcatgtaccctccaccatattatctgggcattggcaatggaactcagatctatgtgatcgatcccgagccctgcccagatagtgaccaagaacctaaatcctctgacaagactcacacatctcctccctctcccgcgcccgagttgctaggaggttcgtctgttttcttattccctccaaagccaaaggataccctgatgatcagtcgcacacctgaggtgacgtgtgtggttgtcgacgtcagtcatgaagacccagaagtgaagttcaattggtacgtagacggcgttgaagtgcataatgccaagacgaagccccgggaggagcaatacaactcaacttaccgagtggtgagtgtgctgactgtgttgcaccaagattggctgaatggtaaagagtataagtgtaaggtgagcaataaagcactgcccgctcctattgagaaaacaattagcaaagcaaaggggcagccacgggaaccacaggtgtacacattgccaccgtcccgggatgaacttacaaaaaaccaagtgagtcttacatgccttgttaaaggtttttacccatctgatatcgccgtggaatgggagagtaatggacagccggagaacaattataagacaaccccgcccgtccttgatagcgatggatcattttttttgtattccaaactcaccgttgacaaatccagatggcagcagggtaacgtgttctcatgtagcgtgatgcacgaagcccttcataaccattatacccagaagtccttgtctttgagtcccggaaaa

SEQ ID NO: 15642 - DNA, 1149 bp, synthetic construct
  misc_feature 1..1149: note = source = /note="Description of Artificial Sequence: Synthetic coding sequence"
  source 1..1149: mol_type = other DNA
atgggagtcttgctgacacagaggaccctgctcagtcttgtgctggccctgcttttcccgtctatggcgtccatggcgatgcacgttgcccagcccgctgttgtcttggcttctagccgcgggattgcctcattcgtgtgtgaatacgcctccccaggtaaagctacagaagtcagagtcacggtgcttcgccaggccgacagccaggtaaccgaggtttgtgccgcaacatatatgatggggaatgagttgacattcctcgacgactccatctgtaccggcacaagctccgggaaccaggtgaacctgactattcaggggctgcgcgcaatggatactggcctctacatatgcaaagtggaactcatgtatcctccaccctactacttgggcattggaaatggtactcagatctatgtcattgaccccgagccatgcccagacagcgatcaggagccgaagagttccgacaaaactcacactagtccaccttcaccggctcccgagctcctggggggctcttctgtgttcttgttccccccaaaacccaaggacacccttatgatctccagaacaccagaagtcacctgcgtagtggtggacgtatctcacgaggatcctgaggtcaagttcaattggtatgtggacggcgtggaagtccacaacgccaagacgaagccacgagaagagcagtacaatagcacctatagggttgtgtctgtattgaccgttcttcatcaggactggcttaatggtaaggaatacaagtgtaaggtctctaacaaggcccttccggcgcccattgagaaaaccatctccaaggctaaggggcagcccagggaaccacaggtgtacacccttccacccagccgggacgagctgaccaagaatcaggtatccctgacttgccttgtgaagggcttctatccctcagacatcgcagtcgaatgggagtccaatgggcagcctgagaataattacaaaaccacgccacctgtccttgacagcgacggctccttttttctgtattccaagctgacggtggacaaaagccggtggcaacagggcaatgtgttttcttgctctgtgatgcacgaagccctgcacaatcactacacacagaagagtttgtcactgagccccgggaaa

SEQ ID NO: 15643 - DNA, 1149 bp, synthetic construct; identical to SEQ ID NO: 15621
  misc_feature 1..1149: note = source = /note="Description of Artificial Sequence: Synthetic coding sequence"
  source 1..1149: mol_type = other DNA

SEQ ID NO: 15644 - DNA, 1149 bp, synthetic construct
  misc_feature 1..1149: note = source = /note="Description of Artificial Sequence: Synthetic coding sequence"
  source 1..1149: mol_type = other DNA
atgggcgtgcttctgacacagaggacgcttttgagtctcgtgttggctctcctgttcccttctatggccagtatggccatgcacgtcgcccagccagctgttgtactggccagctcacgcggcattgccagctttgtatgtgaatatgcctcccccgggaaggcgacagaagtgagagtcaccgtgctgcgccaggcagattcgcaggtcaccgaggtgtgtgccgccacttacatgatgggtaacgagctgaccttcttggatgattccatatgcactgggacttccagtggcaaccaagttaatctcaccattcaggggctgcgggcaatggataccgggctgtatatctgcaaggttgaattgatgtacccacccccctattatctaggtataggcaacggaacacaaatatacgtgatcgatcctgagccatgtccagattcagaccaagaaccgaagagttcagacaagacccatacctcacccccgtctcccgctccagaactcctgggcggctctagcgtatttctctttccacctaagcccaaggacacacttatgatctcccggactcccgaggtgacttgtgtggttgttgatgtgagccacgaggaccctgaagtcaaatttaattggtatgtggatggcgtcgaggtgcacaacgccaaaacaaagcctcgagaagaacagtacaactcaacttatagagtggtgagtgtgttgaccgtgctccatcaggactggcttaacggaaaggaatataagtgcaaagtgagcaacaaagctctgcctgctcccatcgaaaagacgatcagtaaagccaaaggccaaccacgagagccccaggtgtatacgctgcccccgtcccgggacgagctgaccaaaaaccaggtgtcattgacctgtctcgtgaaggggttttatcccagcgatatcgccgtcgaatgggaaagcaatggacagccggaaaacaattacaagactacgcctcccgtgctagattcagacggctcattctttctgtactcaaaactgactgtagacaaatcgcggtggcaacagggcaatgtgttcagctgcagtgtaatgcacgaggccctccataatcactacacccaaaagtctttgtctttgagtccagggaag

SEQ ID NO: 15645 - DNA, 1149 bp, synthetic construct
  misc_feature 1..1149: note = source = /note="Description of Artificial Sequence: Synthetic coding sequence"
  source 1..1149: mol_type = other DNA
atgggtgtactcctgactcaaaggactctgcttagcctggtgctcgccctgctttttccgtccatggcaagcatggcgatgcacgtggcacagccagccgtggtccttgcatcttctaggggaatagcttcattcgtctgcgaatatgcatcccccggaaaggccaccgaggttcgggtgactgtcctcagacaggctgattctcaggtgacggaggtttgtgcagctacatacatgatggggaatgagctgaccttcctcgacgatagcatttgcactgggacaagctccgggaaccaagtgaacctgaccattcagggcctgagagccatggacaccggactgtatatctgtaaggtcgagctgatgtaccctccgccgtattacctgggaattgggaacggtacacagatatacgtcatcgaccccgagccttgcccggatagcgatcaggaaccaaaatcttccgataagacacatacatcaccgccaagccctgctccagaactactgggaggatcatcggtcttcctattccctccgaaacctaaggatacgcttatgatttccagaactccagaggtgacgtgtgtggtagtcgatgtgagtcacgaagaccctgaggtcaaattcaattggtacgtggatggcgtggaggtccacaacgcgaaaactaaaccccgcgaggagcaatataactccacctatcgggtcgtcagcgtactcaccgtgttgcatcaggattggcttaacgggaaggagtataagtgcaaggtgtccaacaaggcactcccagcccctatcgagaagaccataagtaaagcaaaggggcaaccaagagagccacaggtttacacgttacctccctcacgggacgagctgaccaaaaaccaagtgagcttgacctgcttggtaaagggattctatccaagcgacatcgcagtggagtgggagtcaaacggtcagcccgaaaataactacaagacaacccccccggttctggacagcgacggctctttttttctatatagcaaacttaccgtggacaaatcccggtggcagcagggaaacgtgtttagctgttccgtcatgcacgaagcgcttcacaatcattatacacagaaatccctgtccctcagtcccggtaaa

SEQ ID NO: 15646 - DNA, 1149 bp, synthetic construct
  misc_feature 1..1149: note = source = /note="Description of Artificial Sequence: Synthetic coding sequence"
  source 1..1149: mol_type = other DNA
atgggtgttctattaacgcaacgaacgttactatcgctagtattagcgctattatttccgtcgatggcgtcgatggcgatgcatgtagcgcaaccggcggtagtactagcgtcgtcgcgtggtatagcgtcgtttgtttgtgaatatgcgtcgccgggtaaagcgacggaagtacgagttacggtattacgtcaagcggattcgcaagtaacggaagtatgtgcggcgacgtatatgatgggtaatgaactaacgtttttagatgattcgatatgtacgggtacgtcgtcgggtaatcaagttaatttaacgatacaaggtttacgagcgatggatacgggtttatatatatgtaaagtagaattaatgtatccgccgccgtattatctaggtataggtaatggtacgcaaatatatgtaatagatccggaaccgtgtccggattcggatcaagaaccgaaatcgtcggataaaacgcatacgtcgccgccgtcgccggcgccggaattattaggtggttcgtcggtatttttatttccgccgaaaccgaaagatacgctaatgatatcgcgtacgccggaagtaacgtgtgtagtagttgatgtatcgcatgaagatccggaagtaaaatttaattggtatgtagatggtgttgaagttcataatgcgaaaacgaaaccgcgtgaagaacaatataattcgacgtatcgtgttgtatcggtattaacggtattacatcaagattggttaaatggtaaagaatataaatgtaaagtttcgaataaagcgctaccggcgccgatagaaaaaacgatatcgaaagcgaaaggtcaaccgcgagaaccgcaagtatatacgctaccgccgtcgcgtgatgaactaacgaaaaatcaagtatcgttaacgtgtttagtaaaaggtttttatccgtcggatatagcggttgaatgggaatcgaatggtcaaccggaaaataattataaaacgacgccgccggttttagattcggatggttcgttttttctatattcgaaattaacggtagataaatcgcgatggcaacaaggtaatgtattttcgtgttcggtaatgcatgaagcgttacataatcattatacgcaaaaatcgttatcgctatcgccgggtaaa

SEQ ID NO: 15647 - DNA, 1149 bp, synthetic construct
  misc_feature 1..1149: note = source = /note="Description of Artificial Sequence: Synthetic coding sequence"
  source 1..1149: mol_type = other DNA
atgggcgtgttgctcacccagcggactctgctttcactggtcctcgccctcctttttccatcgatggcatcgatggcgatgcacgtggctcaacctgcggtggtgctggcatcgtcacgcggcattgcatccttcgtttgtgagtacgccagccccggaaaagcgactgaagtgagagtaactgtgctcagacaggcagattcacaagtcacggaggtctgcgcagccacctatatgatgggtaatgaactgacgttccttgacgattcgatttgtactgggacctcgagcggaaatcaagtcaaccttaccattcaaggtctgagggcaatggataccgggctgtacatatgtaaggtggaacttatgtacccacctccttactacctggggattggaaatggtacccagatctacgtgatcgatccagaaccttgtcccgactccgatcaagagccaaagtcgtctgataaaacgcataccagccctccctcacctgcacctgagcttttgggaggctcaagcgtgttcctctttccccctaagccgaaggatactcttatgatcagcagaactccagaagtgacctgcgttgtggtagacgtctcacatgaggatccagaagtgaagtttaactggtatgtcgatggagtggaggtccataatgcaaagaccaaaccaagagaggagcagtacaactcgacttacagagtggtgagcgtcctgaccgttctgcatcaggactggcttaacggaaaagaatacaagtgcaaggtgtctaacaaagccctcccggcacctattgaaaaaacgatctccaaggcaaagggacaaccacgcgaacctcaagtgtacacgctgcccccttcgcgcgacgaactgaccaagaatcaggtgtctctgacctgtttggtcaagggcttttacccatctgacatagccgtcgagtgggaaagcaacggccagcctgaaaacaattacaagactactcctcctgtgctggattccgatggatcgttctttctgtactctaagctgactgtggacaagtctcgttggcagcaaggcaacgtgtttagctgttccgtgatgcacgaagctcttcataaccactacactcagaaaagcctctctcttagtcccggaaag

SEQ ID NO: 15648 - DNA, 1149 bp, synthetic construct
  misc_feature 1..1149: note = source = /note="Description of Artificial Sequence: Synthetic coding sequence"
  source 1..1149: mol_type = other DNA
atgggagtgctgctcacccaaagaaccctcttgtcgctggtgctcgccctgctgttcccgagcatggcttcgatggcgatgcacgtggcacaaccggcggtggtgctcgcatcatccagaggaatcgcgtctttcgtctgtgaatacgcaagccctggaaaggcaaccgaagtgagagtcactgttctccggcaggctgactcgcaggtgactgaagtgtgcgccgcaacctacatgatgggcaacgaattgaccttccttgacgactccatctgcaccggcactagctccggaaaccaggtgaatcttaccatccaaggcctgagggccatggatacgggtctttacatctgtaaggtggaactcatgtacccaccgccgtactatctgggcatcggaaacggaacccagatctatgtgatcgatccggaaccgtgtcccgactcggaccaagagccgaagtcatccgacaagacccacacctcccctcctagcccagccccggagcttctgggaggatcgtcagtctttctcttccctcctaagccgaaggatactctcatgatctcgcggactccagaggtgacctgcgtggtggtggatgtgtcacacgaggatcccgaagtcaagtttaactggtacgtggacggcgtggaagtccacaacgcaaagacgaagccgagggaggaacaatacaattccacctaccgggtcgtgtctgtcttgactgtgctccatcaagactggctcaatggtaaggagtacaaatgcaaagtgagtaacaaagccctgcccgctccgatcgaaaaaaccatcagcaaagccaaaggacagccgcgcgagcctcaagtgtacactctcccgccgagccgggacgaactgactaagaatcaagtctccttgacttgtctcgtcaaggggttttacccatccgatatcgccgtggagtgggagtcaaacggccagccagagaacaattacaagactaccccgccggtgctggacagcgacggatcctttttcctttactccaaactgacggtggataagtcccggtggcagcaaggcaacgtgttctcctgctcggtgatgcatgaggccttgcacaaccactacactcagaagtcactgtcgctctccccgggcaag

SEQ ID NO: 15649 - DNA, 1149 bp, synthetic construct
  misc_feature 1..1149: note = source = /note="Description of Artificial Sequence: Synthetic coding sequence"
  source 1..1149: mol_type = other DNA
atgggtgtgctgctgacacagcggacattgctttcactggtgctggccttgctttttccttccatggcgagcatggccatgcatgttgctcagcccgcagtggtgctggcgagctcccgggggatcgcttcttttgtgtgcgagtatgcatcccccggcaaggccactgaggtccgggttacagtgttgcggcaggcagactctcaggtcaccgaggtgtgcgcggcgacctacatgatgggaaacgaattgaccttcctcgacgatagcatatgcactggcactagcagcggtaatcaggtgaaccttacaatccagggcttgcgggctatggacaccggcctgtacatttgcaaagtggagctgatgtaccccccaccctactacctcgggattggtaacggaacacagatctatgtgatcgatccagaaccatgccctgattctgaccaggagcccaaatccagtgacaagacacatacgagccctccatcccccgccccagaactgctgggaggctcctctgtcttcctctttcctcccaagcccaaggacaccttgatgatctcaaggacccctgaggtaacatgtgttgtggtagatgtcagtcacgaggacccagaagtaaaattcaattggtatgtcgatggagtggaggtacataacgcaaagacaaaacccagagaagaacaatataacagcacttatcgggtggtaagcgtgttaaccgtcctccatcaagattggctcaatgggaaagagtataagtgtaaggtttctaacaaggccctcccggcgccgatagagaaaacgatttctaaggcaaaaggacaaccccgtgagccccaggtttatacccttcccccatccagggatgaacttactaaaaaccaggtgtctcttacctgtctggtaaaagggttttaccctagtgacatcgccgtcgaatgggagtctaatggacagccagaaaacaactacaagaccacccctcccgtgctggattcagatggttcctttttcctttattccaaactaacagtggacaagtcaaggtggcagcagggcaatgtcttcagttgttctgtgatgcacgaggcgttgcacaatcactatactcagaagtcattatcactgtcaccagggaag

SEQ ID NO: 15650 - DNA, 1149 bp, synthetic construct
  misc_feature 1..1149: note = source = /note="Description of Artificial Sequence: Synthetic coding sequence"
  source 1..1149: mol_type = other DNA
atgggagtattattaactcaaagaacactactctcattagttttagctttattatttccatcaatggcatctatggctatgcatgtcgcacaaccagctgttgttttagcatcttcaagaggaattgcatcttttgtttgtgaatatgcttcaccaggaaaagctactgaagttagagtaacagttcttagacaagctgatagtcaagtaacagaagtttgtgctgcaacatatatgatgggtaacgagttaacatttttagatgattctatttgtactgggacttcatctggtaatcaagttaatcttactattcagggactacgagcaatggatactggtttatatatatgtaaagttgaattaatgtatccaccaccatattatttaggaattggtaatggaacacaaatttatgttatagatccagaaccatgtccagatagtgatcaagaaccaaaatcatcagataagactcatacttctccaccatcaccagcacctgaattacttggaggaagttcagtttttttatttcctcctaaaccaaaagacacacttatgatcagtaggacacctgaagttacctgtgtagttgttgatgtttcacatgaagatccagaagttaaatttaattggtatgttgatggagttgaagttcacaatgcaaagacaaaaccacgtgaagaacaatacaattcaacatatagagttgtttctgtacttaccgtacttcatcaagactggcttaatggaaaagaatataagtgtaaagttagtaataaagctctacctgctccaatagaaaaaactatatcaaaagctaaaggacaaccaagagaaccacaagtatatacattaccaccaagtcgtgatgaattaacaaagaaccaagtaagccttacatgtcttgttaaaggattctatccaagtgatatagcagttgaatgggaatctaatggacaaccagaaaataattataaaacaactccaccagttttagattctgatggttcattttttttatattctaaattaactgtagataagagtagatggcaacaaggaaatgtgttttcttgctctgttatgcatgaggcccttcataatcattacactcaaaaatctctttcacttagtccaggaaaa

SEQ ID NO: 15651 - DNA, 1149 bp, synthetic construct
  misc_feature 1..1149: note = source = /note="Description of Artificial Sequence: Synthetic coding sequence"
  source 1..1149: mol_type = other DNA
atgggagtgctgcttacccagaggaccctgctgagcctggtgctggccctcttgttcccctcaatggccagcatggcaatgcacgtggcccagccggccgtggttctggcgtcgtcacgggggattgcatccttcgtgtgcgaatacgcgagccccggcaaggcgaccgaggtgcgggtgactgtgctgcgccaggctgactcccaagtgactgaggtctgcgccgcaacctacatgatgggaaacgaacttacgttcctggacgattcgatctgcaccggaacctcatcgggaaaccaagtgaatctgacgatccaaggtctgcgggctatggatactggcctgtacatctgcaaggtcgaactgatgtacccaccaccgtattacctgggaataggaaatggaacccagatctacgtgatcgacccggagccttgcccagacagcgaccaggagcctaagtcgagcgataagacccatacgtcccctccgtcgcccgcgcctgagttgctcggtggatcctcagtctttctgttcccaccgaagccaaaagacacgctcatgatctcgcgcacccctgaagttacctgcgtggtcgtggacgtgtcacatgaggaccccgaggtgaagttcaactggtacgtggacggtgtcgaagtgcataacgctaagactaaacctcgcgaggaacagtataactcgacttacagagttgtgagcgtgctgaccgtgctgcaccaagactggctcaacggaaaagaatacaagtgtaaggtgagcaacaaggccctgccggcgccgatcgagaaaaccatctccaaggccaaaggacaaccccgggagccccaagtgtacaccctgccgccttccagagatgagctcactaagaatcaggtgtcgctcacttgtctggtgaaagggttctacccctcagatattgccgtggagtgggaatccaacggacaaccagagaacaactacaagactaccccgccagtgctcgactcggatgggtcgttcttcctgtactccaaacttaccgtcgataaatcccggtggcaacagggcaatgtgttttcgtgcagcgtgatgcatgaggcgctccataaccattacacccagaagtcattgagcctctcacccggtaag

SEQ ID NO: 15652 - DNA, 1149 bp, synthetic construct
  misc_feature 1..1149: note = source = /note="Description of Artificial Sequence: Synthetic coding sequence"
  source 1..1149: mol_type = other DNA
atgggagtgctgctgactcagcggacactgctctctctcgttttggccttgctgttcccaagtatggcttcgatggccatgcacgtggcccagcctgcggttgtgttggcaagttcaagaggaattgcctccttcgtgtgcgagtatgctagtccaggcaaggcaaccgaggtccgcgtgacagttctgcggcaggccgacagccaggtgaccgaggtgtgcgctgccacatacatgatgggcaacgagctcaccttccttgacgattctatttgtacaggaacttcctcagggaaccaagtgaatctgaccatccagggtctgcgagccatggataccggattgtacatatgtaaggtcgagctcatgtacccaccaccctattacctggggataggcaatggcactcaaatctatgtaatagatccagaaccatgtcctgattctgatcaggagcccaagtccagtgacaaaacgcatacaagcccgcctagccccgcccccgagcttctaggtggatcttccgtttttttgttcccacctaagccgaaagacacgcttatgataagtagaacccctgaagtgacctgcgtggtagttgatgtatctcacgaggatcccgaagtgaagtttaattggtatgttgatggggtcgaggtgcacaatgccaagacgaagccacgagaggagcagtacaacagtacataccgggtggtatcggtgctaactgtcctccaccaggattggctgaatggtaaagaatacaaatgtaaagtttccaataaagcgctgcccgctccgatcgagaagaccatcagcaaggccaagggacagccccgcgaaccccaagtgtacactctcccccctagccgcgatgaactgactaagaatcaggtgagcctgacctgtctggttaagggcttttaccccagcgatattgccgtggaatgggagagcaacggacagcctgaaaataactataaaaccaccccaccagttctcgattccgatggttctttctttctgtattccaaactgaccgtcgacaagagccgatggcagcagggaaatgtgtttagttgcagtgtgatgcacgaggctctgcataaccactacacacagaagtccctaagtctttcgcccggaaag

SEQ ID NO: 15653 - DNA, 897 bp, synthetic construct
  misc_feature 1..897: note = source = /note="Description of Artificial Sequence: Synthetic coding sequence"
  source 1..897: mol_type = other DNA
atgaagtgggtttcgttcatctcgcttctgttcctcttctcttccgcctactcgggttcactcgataaaagacacggcgaagggaccttcacgagcgacgtctcctcctacctggaagagcaggcagccaaggaattcattgcatggctcgtgaaaggcggagggggaggcggtggatcgggaggcggagggagcggaggtggaggctccgccgagtcaaagtacggaccaccatgccccccgtgcccggcgccggaggcagccgggggcccatcagtctttctttttcctcccaagcctaaggataccctgatgatttcacgcacgccggaggtcacctgcgtggttgtggacgtgagccaagaggatccggaggtgcaattcaattggtacgtcgacggagttgaggtgcataatgcaaagaccaaaccacgggaggaacagttcaattcgacttaccgcgtcgtgagcgtgctgactgtgttgcaccaggattggctgaatggaaaggagtacaagtgtaaggtgtcgaacaagggactgccgtcctcgatcgaaaagactatcagcaaggccaaaggacagccgagagaaccgcaggtgtacaccctgccgccgtcccaggaagagatgactaagaatcaggtttcgctgacctgtttggtgaagggcttctacccgagcgacatcgccgtggaatgggagtccaatggtcagccggaaaacaattacaaaaccacgcccccggtgctcgactcggacgggtctttcttcctgtactcccggctgactgtggataagagccgttggcaagaaggaaacgttttttcctgttcggtcatgcacgaggcactgcacaaccattacacccaaaaaagcctcagcctgtcccttggg

SEQ ID NO: 15654 - DNA, 897 bp, synthetic construct
  misc_feature 1..897: note = source = /note="Description of Artificial Sequence: Synthetic coding sequence"
  source 1..897: mol_type = other DNA
atgaagtgggtgtcgttcatctcactgctgtttctcttcagtagcgcgtacagcggtagccttgacaagaggcatggagaaggaacctttaccagtgacgtgagtagctatctcgaggaacaggcggcaaaggaattcatcgcgtggctggtcaaaggtggtgggggaggaggtggctccggaggcggaggctcaggaggcgggggaagcgctgaatcgaagtacggccctccgtgcccaccttgtccagcccctgaagccgcagggggaccttcggtctttctgtttccacctaaaccgaaggacaccctcatgatctcccggacccccgaggtgacctgcgtggtggtggacgtgtcccaggaggatcccgaggtgcagttcaattggtacgtcgacggggtggaggtgcacaacgccaaaaccaagccgagagaggaacagttcaatagcacttaccgcgtcgtttctgtgctcaccgtacttcaccaagattggctgaacggcaaagagtacaagtgtaaggtgtcgaacaagggattgccatcctccatcgaaaagactatctccaaggccaaaggtcaaccccgggaacctcaagtctacacgctgccgccatcgcaggaggagatgaccaagaaccaagtctccctgacttgcctggtcaaaggcttctacccgtcagatattgctgtggaatgggagagcaacgggcaacctgagaacaactacaaaactacgccgccggtgctcgactcggatggctcgttcttcctttactcccgactcaccgtagacaagagccgctggcaggaaggcaatgtgttcagctgttctgtgatgcacgaagccctgcacaatcattacactcagaagtcgctgtcgttgtcgctgggc

SEQ ID NO: 15655 - DNA, 897 bp, synthetic construct
  misc_feature 1..897: note = source = /note="Description of Artificial Sequence: Synthetic coding sequence"
  source 1..897: mol_type = other DNA
atgaagtgggtgtcattcatatcactcctctttctgttttctagtgcatattcagggtctcttgacaaacgacatggagaaggaactttcactagtgacgtgtcttcttacctggaggaacaggctgcaaaggaattcatagcctggcttgtgaaaggaggaggaggggggggaggatctggagggggggggtctggaggaggagggtctgctgaatctaaatatggacctccatgtcctccatgtcccgcaccagaagccgcaggggggccttctgtgttcctgtttccacctaaaccaaaagatacgctaatgatatctcgcacacccgaagtgacatgtgtggtggtggatgtttcacaggaagatcccgaagtacagttcaactggtatgtagatggggttgaagtgcataatgccaaaactaaacctcgggaggagcagttcaattcaacgtatagggttgtgtcagtactgacagtcctgcaccaggattggttaaacgggaaagaatataaatgtaaagtcagtaacaaagggttaccctctagtatcgaaaaaacaatttctaaagcaaaaggacagccgcgcgaacctcaggtctatactctccctcccagtcaggaagaaatgactaaaaatcaagtttcacttacatgcttggtgaaaggattctacccttcagatatagcagtggaatgggaatcaaacgggcagcctgaaaataattataagacaacaccccccgttctggattctgatgggtctttttttctgtatagtcgcttaacagtggataagtccaggtggcaggaagggaatgtgtttagttgctctgttatgcatgaagccctccataatcattacactcagaaatctttaagtctctctcttgga

SEQ ID NO: 15656 - DNA, 897 bp, synthetic construct
  misc_feature 1..897: note = source = /note="Description of Artificial Sequence: Synthetic coding sequence"
  source 1..897: mol_type = other DNA
atgaagtgggtgagcttcatttccctgctctttcttttttcctcagcctacagcggcagcttggataagcggcatggtgagggcacctttacttcagatgtgtcgtcctaccttgaagagcaagcagcaaaagagttcattgcttggctggtgaaaggcggtggcggcgggggtggttccggaggcggagggtcgggtggtggaggcagcgcagaatccaaatacggacccccatgtcctccctgtcccgccccagaggcagcagggggcccatccgtgttcctcttccctcctaagcctaaggatactctcatgatttcgcgaacccctgaagtgacctgtgtggtggtggacgtctcccaggaagatcctgaggtgcaattcaattggtacgtggatggtgtggaagtgcataacgcgaaaactaagccccgcgaggaacagttcaacagcacctaccgcgttgtgtcagtcctgaccgtgctgcaccaagactggcttaatggcaaagaatacaaatgtaaggtgtcaaacaaaggtttgccatcgtctatagagaaaactatatcaaaggccaagggtcaaccaagagaaccacaggtctacaccctgcctccttcacaagaagagatgaccaaaaaccaggtgtcccttacctgtcttgtcaaggggttttacccatcggatattgcagtggaatgggaatccaacggacagccagaaaacaactacaaaacgactccaccagtgttggattccgatggaagtttctttctgtattcccgtttgaccgtggacaagagccggtggcaagaaggaaatgtgttttcgtgttccgtgatgcacgaagcactgcataaccattacacccaaaaatcgctctccctgtcgctcggg

SEQ ID NO: 15657 - DNA, 897 bp, synthetic construct
  misc_feature 1..897: note = source = /note="Description of Artificial Sequence: Synthetic coding sequence"
  source 1..897: mol_type = other DNA
atgaagtgggtttccttcatcagcctgttgtttcttttttcgtccgcatactcgggatccctggataagaggcacggtgaaggaacctttacgtcagatgtgtcaagctacttggaggagcaggcggcaaaggagttcattgcgtggctggtcaagggtggtggtgggggcggcggttccggagggggaggatccggagggggcggctctgctgagtcgaagtacggtcctccttgtcccccatgcccagccccagaagcagcaggagggccatcggtgtttctgtttcctcctaagccaaaggacactctgatgatctcgcggacccccgaagtgacctgcgtcgtggtggacgtctcgcaggaggatcctgaagtccagtttaactggtacgtggacggagtggaagtgcataatgcaaagaccaagcccagagaagaacagtttaactcgacctatcgcgtggtgtcagtgctgactgtgctgcaccaggattggctgaatggaaaggagtacaagtgcaaggtatcgaacaaaggtttgccttcatcaattgaaaagaccatcagcaaggccaagggacagcctagagaaccgcaagtctacactctcccacctagccaagaagaaatgaccaaaaaccaagtctccctcacctgtctcgtgaaaggattttacccttcagacattgcagtggaatgggaatcgaacggccaacccgagaacaactataagacgacccctcctgtgctggattccgatggatcgttttttctgtactcgcgtcttactgttgataagtcccggtggcaagaagggaatgtgttctcatgcagcgtcatgcatgaggcactgcacaatcactacactcagaagtcactgtccctttcgttggga

SEQ ID NO: 15658 - DNA, 897 bp, synthetic construct
  misc_feature 1..897: note = source = /note="Description of Artificial Sequence: Synthetic coding sequence"
  source 1..897: mol_type = other DNA
atgaagtgggtcagctttatctccttgttgttcctattcagctcagcctacagcggctccctcgataagcgccacggagaagggacttttacgtccgacgtctcatcgtacctggaagagcaggcagctaaggagtttatcgcatggcttgtcaagggtgggggcggaggtggtggctctgggggaggagggagcggcggggggggaagtgctgaaagcaagtatggccccccttgtcctccgtgtcctgctccggaggccgctggtggtccaagcgtatttctctttccccccaagcccaaagataccctgatgatctctcgtaccccagaggttacatgtgtagttgtggatgtatcccaagaggaccctgaggtacagtttaattggtacgtggacggagtggaagttcataacgcgaagactaagccacgcgaagagcagttcaatagcacttaccgcgttgtgagcgtgctcacggtgctccaccaagactggttaaacggcaaggaatacaagtgcaaggttagtaataagggtttgccttctagtatagagaagacaattagtaaggccaaggggcagccacgagagccccaggtgtatacgctaccgccaagtcaggaggaaatgactaaaaatcaagtatcactgacatgcttagtcaagggattttacccaagcgacatcgccgttgagtgggagtctaatggtcagcctgaaaacaattacaaaacaactccaccggtcctcgattcggatggatcattttttctgtactccagactgactgtggacaagagtcgatggcaggaagggaacgtttttagttgttccgttatgcacgaagccctgcacaaccactacactcagaagagtctgtccctcagcttgggc

SEQ ID NO: 15659 - DNA, 897 bp, synthetic construct
  misc_feature 1..897: note = source = /note="Description of Artificial Sequence: Synthetic coding sequence"
  source 1..897: mol_type = other DNA
atgaagtgggtcagttttattagcctgctgttccttttctcttccgcatatagtggtagtctggataaacgacatggggaggggaccttcacatcagacgtctctagctacctcgaggaacaagctgccaaggaattcatcgcctggttggtgaagggcggcggcgggggcggcggctcaggcggggggggcagcggcggaggaggctccgccgagagcaaatatgggccaccttgcccaccgtgtccagcaccagaagcggctggcggaccctcggtcttcctgtttccccctaaacctaaggacacccttatgatcagtagaacccctgaagtcacttgcgtggtggtggacgtgagtcaggaggatccagaggtacaatttaattggtatgtggacggagtcgaagtgcacaatgcaaagacaaaacctagggaagagcagtttaattctacgtatagggtggtgtcagtactcactgtactgcatcaggactggctgaatggcaaggagtataagtgcaaggtcagtaacaaggggctaccaagttcaattgagaaaacaatttcgaaagcaaaaggccagcctagagagcctcaggtgtatacgctgcctccctctcaggaggagatgacaaaaaatcaagtgtcattgacctgtctcgtgaaggggttctatccaagcgatatcgccgttgaatgggaaagtaatggacaaccggagaacaactataaaacgacacctccagtgctcgactccgacggtagcttttttctatacagtaggcttaccgtcgacaaatcgcggtggcaggagggcaatgtgttctcctgttcagtcatgcacgaagcccttcataatcattatacccaaaaaagcctttccctttctttgggt

SEQ ID NO: 15660 - DNA, 897 bp, synthetic construct
  misc_feature 1..897: note = source = /note="Description of Artificial Sequence: Synthetic coding sequence"
  source 1..897: mol_type = other DNA
atgaagtgggtgagcttcatcagcctgctcttccttttttcatcggcctactccggatcgttggacaaacggcatggcgaagggacctttacttcagatgtgtcatcgtaccttgaggagcaggcagcgaaagagttcatcgcgtggctggtgaaaggaggcgggggaggaggaggtagcggcggtggaggaagcggagggggtggttcagcagaaagtaaatacggcccaccttgccctccgtgcccggctcctgaagctgcgggtgggccgtcggtctttctgttccctccaaagccgaaggacaccctgatgatctcgcggaccccagaggttacttgcgtggtggtcgatgtcagccaagaagatccggaagtgcagtttaactggtacgtggacggtgtggaggtgcataatgccaagactaagccaagggaagaacagttcaactcgacctacagagtcgtgtcagttttgactgtgctccaccaagactggctgaacggcaaggaatacaaatgcaaggtgtcaaacaagggcctgccgtcgtcaatcgagaaaactatctctaaggccaaaggacagccgcgggaaccgcaggtgtacaccctgcccccttcacaggaggaaatgactaaaaaccaggtgtcgctgacttgcctggtcaaggggttttacccctctgacatcgctgtcgagtgggaatcaaacgggcagccagaaaacaattacaaaaccaccccaccggtcctggactcggacggatcgtttttcctctactcacggctgacggtggataagtcccgctggcaggagggaaacgtgttctcatgttcggtgatgcacgaagcactgcacaaccactacactcagaagtcactttccctcagcctgggt

SEQ ID NO: 15661 - DNA, 897 bp, synthetic construct
  misc_feature 1..897: note = source = /note="Description of Artificial Sequence: Synthetic coding sequence"
  source 1..897: mol_type = other DNA
atgaagtgggtcagctttatctcgctgctttttctgttcagcagcgcctactccggctccctcgataagcgccatggagagggaacctttacttccgatgtcagctcgtatcttgaagagcaggcagcaaaagagtttatcgcttggcttgtgaaggggggcggtggcggtggtggctccggcggcggaggctcgggtggaggtggtagcgcggaatcaaagtacggacccccctgtcccccgtgtcctgcacctgaagcagcaggtgggccctcagtgttccttttccctcctaagccaaaagacacccttatgatttccagaacccctgaggtgacctgtgttgtggtggatgtgtcacaagaagatcctgaagtgcaattcaactggtatgtcgacggagtggaagtgcacaacgcaaaaactaagcccagagaggaacagtttaactcgacctacagagtggtgtccgtgcttactgtgctccaccaggattggcttaacgggaaggagtacaagtgtaaagtctccaataaaggactgccatcgtcaatcgagaaaaccatatcaaaagcaaaggggcagcctagggaaccacaagtgtacactcttccaccaagccaagaagaaatgactaagaaccaggtttctttgacttgtctcgtgaaaggcttctacccctccgatattgccgtcgaatgggagtccaacgggcaaccagaaaacaactacaaaaccacccctccagtgctggatagcgacggctcattctttctgtattcgaggctgactgtggataaaagcaggtggcaagaaggaaatgtgttttcgtgttccgtgatgcatgaggcgctccacaaccactacactcagaagtccctgtctttgtccctgggg

SEQ ID NO: 15662 - DNA, 897 bp, synthetic construct
  misc_feature 1..897: note = source = /note="Description of Artificial Sequence: Synthetic coding sequence"
  source 1..897: mol_type = other DNA
atgaagtgggtatcgttcatcagcctgctgtttcttttttcgagtgcatactcaggcagtcttgataagcgccacggcgagggcaccttcacctccgatgtaagctcatacctcgaggagcaggccgccaaggaattcatagcatggctagtcaagggcgggggaggggggggaggttcaggaggcgggggatccgggggcggaggctctgcagaatcaaaatacggaccgccatgtcccccttgccctgcccctgaggctgctggtgggccctctgtttttttatttccaccaaaacccaaggatacactgatgatctccagaaccccagaggttacctgcgtcgtcgtcgatgttagtcaggaagacccagaggttcagttcaattggtacgtagatggtgtggaggtgcacaatgccaagactaagcctagggaagagcagtttaacagcacatacagggtcgtgagtgtgctcacagtcctccatcaggattggctgaacggaaaggaatacaaatgcaaagttagcaataaaggcctcccgagttccatcgagaaaaccatcagtaaggctaagggccagccaagagagcctcaggtgtataccctcccccccagtcaagaggaaatgacgaaaaatcaagttagtctgacgtgccttgtaaagggtttctacccctcggacatcgccgtggaatgggaatccaacgggcagcctgagaataattataagaccacccctcccgtgctggattctgatggtagtttcttcttatacagcagactgaccgtggacaaatcaagatggcaggagggtaacgtcttcagctgctcggtgatgcatgaggctctccacaatcattatactcagaaatcactgagcctctcgcttggc

SEQ ID NO: 15663 - DNA, 897 bp, synthetic construct
  misc_feature 1..897: note = source = /note="Description of Artificial Sequence: Synthetic coding sequence"
  source 1..897: mol_type = other DNA
atgaagtgggtgagcttcatctctttgctgtttctctttagctccgcctatagtgggagcctcgataagaggcatggagaagggacatttacgagcgacgtgagcagctacctggaggagcaagcagcgaaggagttcattgcctggctggtaaagggcggaggaggcgggggcgggtcagggggtgggggtagcgggggcggagggtccgccgagtctaaatacggtcctccctgcccgccctgcccagctcccgaggccgcgggcggaccatctgtcttcctgtttcccccgaagcctaaagacaccctgatgattagcaggacgccggaagtgacttgtgtcgtggttgacgtgtcacaggaagatcctgaagtgcagtttaattggtacgtggatggggttgaagttcacaatgcaaagaccaaaccaagagaagagcaattcaatagcacgtatcgggtggttagcgtgctgaccgtgcttcaccaggactggttgaacgggaaggagtataagtgcaaggtgagtaataaagggttgccgagtagtattgagaagaccatttctaaggccaagggccagcccagagaaccccaggtgtatacccttccccctagccaagaggaaatgaccaaaaaccaggtcagcttgacttgcctggtgaaaggattctatccttccgatattgccgtcgaatgggaaagcaacgggcagccagagaacaactataagactacaccacccgtactcgactccgacggctccttctttctttattccagactgacagtggacaaatcccgatggcaagaaggaaacgttttctcatgcagcgtcatgcacgaagcgctgcataaccattacactcagaagtcattgtctctgtccctcgga

SEQ ID NO: 15664 - DNA, 897 bp, synthetic construct
  misc_feature 1..897: note = source = /note="Description of Artificial Sequence: Synthetic coding sequence"
  source 1..897: mol_type = other DNA
atgaaatgggtctcattcattagcttgctgtttttgttctcaagcgcctactctggatcactggacaagagacacggagagggtacctttacaagcgatgtgagtagttacttggaggagcaggctgcaaaagagttcatcgcttggttggttaaaggtggcggtggaggcggcggctccggtggcggcggatcaggaggaggcggatcagccgagtcaaagtatggacctccgtgccctccctgcccagctcccgaagctgcaggaggaccctccgtatttctcttcccacctaagcctaaagacaccttgatgattagccgcacccctgaagtcacatgcgtggtggtggacgtgtcacaggaagaccctgaggtccaattcaattggtatgtagatggtgttgaggtccataacgcgaagacaaagcctcgcgaggaacagttcaattcaacatatagggtggtgagcgtcctgacagtgctccatcaagactggcttaacggcaaggagtacaaatgtaaagtgtctaacaaaggcctgcctagctcaatcgaaaagactatttctaaagccaaaggccagccacgcgaaccacaggtgtacaccctgccacccagccaggaagaaatgaccaagaaccaggtatccctgacgtgcctggtcaagggcttttatcctagcgacattgccgtggaatgggagtccaacggccagcccgaaaacaactacaagactactcctccggtcctcgattctgatggttcttttttcctgtacagtagactgaccgtggacaagtctcgctggcaggaaggcaatgtttttagctgttctgtaatgcatgaagctcttcataaccattatacccaaaagtctctctcattgagcctgggc

SEQ ID NO: 15665 - DNA, 897 bp, synthetic construct
  misc_feature 1..897: note = source = /note="Description of Artificial Sequence: Synthetic coding sequence"
  source 1..897: mol_type = other DNA
atgaagtgggtgagtttcatctctttactctttctatttagcagtgcctactcgggaagtctggacaaaagacacggcgagggcactttcacaagcgacgttagctcctacctcgaagagcaggccgcaaaagagtttattgcgtggttggtgaagggaggagggggggggggaggcagcggcggcggagggtccggtggtggcggttccgcagagtctaagtatggtcctccatgtcccccctgtcctgctccagaggctgctggggggcctagcgtcttcctatttccaccaaaacctaaggatacgctgatgatctccaggactccagaagtgacatgcgttgtcgtcgatgtatcccaggaggaccccgaagtccaatttaactggtatgtggacggagtggaagttcacaacgctaaaacaaaacctagagaggagcagttcaatagcacatatcgggtggtgtcggtgctgacagtcctgcatcaggactggctaaatgggaaggaatataaatgcaaagtgtccaacaagggactgccaagttcgatcgagaaaacaattagcaaagctaaagggcagcctcgggaacctcaggtttacactctaccacccagtcaggaggagatgaccaaaaaccaggtgtccttgacgtgtttggttaaggggttctacccgagtgacatcgccgttgagtgggagagcaacggacaaccagagaacaattacaagacaaccccgccggtgctcgactcggacgggtcattcttcctctattctcggttaactgttgacaagagccgctggcaggagggcaacgtgttttcatgctctgtcatgcatgaagccctgcataaccactatacgcagaagagcctgagtctgtcactcggg

SEQ ID NO: 15666 - DNA, 897 bp, synthetic construct
  misc_feature 1..897: note = source = /note="Description of Artificial Sequence: Synthetic coding sequence"
  source 1..897: mol_type = other DNA
atgaaatgggtgtcgttcatctcactgctgtttttgttcagttcggcgtacagcggctccctggacaagcggcacggtgaaggcaccttcacgtcggacgtgtcctcgtacctcgaggagcaggcagctaaggagtttatcgcgtggctggtgaaaggaggagggggaggtggaggcagcggcggaggcggttctggaggtggcggatcggccgaatcgaaatacggaccgccatgcccaccttgccccgccccggaggccgccggtggcccgtccgtgtttctgttcccacctaaaccaaaggacaccctcatgatcagccggaccccggaagtgacttgcgtggtggtcgatgtatcgcaggaggacccggaggtccagttcaactggtacgtggacggtgtggaagtgcataacgctaagactaaaccacgcgaagaacagtttaactcaacttacagggtggtgtcggtgctcaccgtcctccatcaagattggctcaacggtaaagagtacaaatgtaaagtctcgaataaaggactgccgtcctcaatcgaaaagaccatctcgaaggcgaaaggtcagccacgcgagccgcaagtctacaccctgcctccgtcccaagaagaaatgaccaaaaaccaggtgtctctgacctgcctcgtgaaaggattttacccgtccgatattgcggtggagtgggaatcgaatgggcaacccgaaaacaattacaagaccactccgccggtgctcgactccgacggatcgttctttctctacagccggctgactgtcgataagagcagatggcaggaaggaaacgtgttctcctgttcagtgatgcacgaggctctccacaaccactacacccagaagtccctgagcctcagcttgggg

SEQ ID NO: 15667 - DNA, 897 bp, synthetic construct
  misc_feature 1..897: note = source = /note="Description of Artificial Sequence: Synthetic coding sequence"
  source 1..897: mol_type = other DNA
atgaaatgggtgagctttatctcactcttgttcctgttctcctcagcgtacagcggctccctcgacaaacggcacggagaaggtacgtttacctcagatgtttcgagctacttggaggagcaggctgccaaggagtttatcgcgtggctcgtgaagggcgggggtggaggcggaggatcaggtgggggaggctcaggtggtggaggatcggccgaatcgaagtacgggccgccatgccctccttgccctgccccagaggcggcaggaggaccatcagtgtttctgttcccgccgaagcctaaggacactctgatgatcagccgcactccggaggtgacctgcgtcgtggtggacgtctctcaagaggatccagaagtgcagtttaactggtacgtggacggagtggaggtccataatgctaagaccaagccgcgcgaggaacagtttaactccacttaccgggtggtgagcgtgcttaccgtgcttcatcaggactggctcaatggtaaagagtataagtgtaaggtgtccaataaagggctcccgtcgtcgatcgaaaagactatctcaaaggcgaagggacagccccgcgaaccacaggtgtacactctcccaccgtcacaggaagaaatgactaagaatcaggtgtcgctcacgtgtctggtcaaaggattttacccgagcgatattgctgtggaatgggaaagtaacggacaacctgagaataactacaaaaccacccctccggtgttggactcagatggatcctttttcctctactcaagactgaccgtcgataagagccggtggcaggaggggaatgtattctcgtgctcggtgatgcacgaagctctgcacaaccattatactcagaagtcgctgtctctgtcactcgga

SEQ ID NO: 15668 - DNA, 897 bp, synthetic construct
  misc_feature 1..897: note = source = /note="Description of Artificial Sequence: Synthetic coding sequence"
  source 1..897: mol_type = other DNA
atgaaatgggttagcttcatttcactgctctttttattttccagtgcatactccggcagtctagacaaacgccacggagaaggaactttcaccagcgacgtcagttcctacctcgaagaacaggccgccaaggaattcatcgcatggctggtaaagggcggcggtggcggtggggggtcagggggaggtggatctggaggagggggctctgctgaaagcaaatatggaccaccttgtcccccttgtccagcgcccgaagctgctgggggccctagcgtcttcctcttccccccaaagccgaaagatactctgatgatctcccgaacccctgaagtgacttgcgtcgtggtggacgtaagccaggaggatcctgaagtgcagttcaactggtatgtggacggggtggaggtccacaatgccaagacaaagcccagggaggagcaattcaactccacctatcgggtagtctcggtgctgaccgttctgcaccaagactggctgaacgggaaggaatacaagtgcaaggtgtccaacaaaggtctcccctcatccatcgagaaaactattagtaaagcaaagggccagccccgtgagccacaggtatacaccctgccaccctcccaagaagagatgaccaagaaccaggtgtcgctgacttgtctggtgaagggtttctatccctccgacatcgcagtcgaatgggagtcaaatgggcaaccagaaaacaactataaaaccacgccccctgtcctagactccgatggctctttcttcctttattctcggctgactgttgacaaatcaaggtggcaagaagggaacgtgttcagttgcagtgttatgcacgaggctctacataaccactacactcagaaatccttaagcctgagtctcggc

SEQ ID NO: 15669 - DNA, 897 bp, synthetic construct
  misc_feature 1..897: note = source = /note="Description of Artificial Sequence: Synthetic coding sequence"
  source 1..897: mol_type = other DNA
atgaagtgggtttcatttatttcacttttattcctttttagttctgcatattctggatctttagataaaagacatggggaaggtacatttactagtgatgtttctagttatttagaagaacaagctgcaaaagaatttattgcatggcttgttaaaggagggggtggaggagggggatctggaggaggaggtagtggaggaggaggatctgcagagagtaaatatggtccaccttgtccaccttgtccagcacctgaagctgctggtggtccaagtgtatttttatttccaccaaaaccaaaagatacgttaatgatatcaagaactcctgaagttacatgtgttgttgttgatgtatctcaagaagacccagaagttcaattcaattggtatgttgatggtgttgaagttcataatgcaaaaactaagcctcgagaagaacaatttaattctacatatagagttgtttcagttttaacagttttacatcaagattggcttaatggtaaagaatataaatgtaaagtctcaaataaaggacttccatcatcaattgaaaaaactataagtaaagctaaaggtcaacctagagaacctcaagtatacactcttccaccatcgcaagaagaaatgacaaaaaatcaagtttctttaacatgtttggtaaaaggtttctatccatctgatatcgctgttgaatgggaaagtaatggtcaaccagaaaataattataagacgacacctccagttcttgattcagatggttcattttttttgtattctcgtcttactgtagacaaatcaagatggcaagaaggtaatgtattctcgtgttcagttatgcatgaagcattacataaccattatactcagaagagtttatctcttagtttaggt

SEQ ID NO: 15670 - DNA, 897 bp, synthetic construct
  misc_feature 1..897: note = source = /note="Description of Artificial Sequence: Synthetic coding sequence"
  source 1..897: mol_type = other DNA
atgaagtgggtgagctttatctcgctcttgttccttttttcctcagcctattccgggagtcttgataagagacacggggaaggaactttcaccagcgatgtctcctcatacctcgaagaacaggcagcaaaggagtttattgcatggcttgtgaagggtgggggtggaggtggaggatcaggtgggggaggtagcggcgggggaggaagcgcagagtccaaatacgggcctccatgcccaccatgtcccgctcccgaggcagccggaggaccttcagtgttcctgtttcctccaaagccaaaagacactcttatgatctcccgcactcctgaggtgacttgtgtggtggtggatgtctcacaggaggacccggaggtccaattcaattggtacgtcgatggtgtggaggtccacaatgcaaagacgaaacctagagaggaacagtttaactcgacctaccgtgtcgtctccgtcttgaccgtgctgcatcaggattggctgaatgggaaagagtacaagtgtaaggtgtcaaataagggattgccatcatcgattgaaaagaccatatcgaaagcgaaaggacagccacgcgaaccacaagtgtataccctgcccccttcgcaagaagaaatgacgaagaatcaagtgagccttacctgtctggtcaaggggttctacccctcggatattgcggtcgagtgggagtcgaacgggcagccggaaaacaactacaagaccacccctcccgtgctcgactccgacggttcgttcttcctgtactcgcgccttaccgtggacaagtcaaggtggcaggaaggaaacgtgttttcgtgtagcgtgatgcatgaagctcttcataaccattacacgcagaagtcgctctcactgtcgcttggt

SEQ ID NO: 15671 - DNA, 897 bp, synthetic construct
  misc_feature 1..897: note = source = /note="Description of Artificial Sequence: Synthetic coding sequence"
  source 1..897: mol_type = other DNA
atgaaatgggtttcgttcatcagccttctgttccttttttcgagcgcatattccggatcgttggataaacgacatggggaaggtactttcacttcggatgtcagctcctacctggaagagcaggcagcgaaggagtttatcgcctggctcgtgaaaggcggtggcggaggagggggttcaggaggaggtggatccggaggaggaggatcagctgaatcaaaatacggccctccgtgtcccccgtgccctgcacctgaggccgccggaggcccctcagtgttcctgttccctccgaagcccaaggacaccttgatgatttcacgcaccccggaagtgacctgcgtcgtcgtggatgtgtcccaggaggaccctgaggtccagtttaactggtacgtggacggtgtcgaggtgcataatgccaagactaagcctcgggaagagcagttcaactcaacttaccgggtggtgtccgtcctgactgtcctgcatcaagactggctgaacggaaaggaatacaagtgtaaagtcagcaacaagggactgccttcctccatcgaaaagaccatctccaaggccaagggacagccgcgcgaacctcaggtgtacactctgccgccctcgcaagaagaaatgactaagaaccaagtgtccctcacctgcctggtgaaagggttttacccatccgatattgccgtcgagtgggagtcgaatggacagccagaaaacaattacaagaccactcctccggtcctcgattctgatggatcgttctttctctactcgcgtctgaccgtcgacaagtcaaggtggcaagaaggaaatgtgttcagctgcagcgtcatgcatgaggccctccacaaccactacactcagaagtcactgtcgctgtcgctcggt

SEQ ID NO: 15672 - DNA, 897 bp, synthetic construct
  misc_feature 1..897: note = source = /note="Description of Artificial Sequence: Synthetic coding sequence"
  source 1..897: mol_type = other DNA
atgaaatgggtgagtttcatttctctgctgttcttattttcctctgcatactccggttcacttgataagagacatggagaagggaccttcaccagcgatgtgtcaagctatctggaggaacaggcggcgaaggagtttatcgcctggttggtaaagggaggcggcggaggcggtggctctggtggaggcggtagtggagggggcgggtcagcagaatcaaagtatggtcccccttgccctccgtgccccgctcccgaagctgcagggggaccaagcgtgtttctctttccgcctaagcctaaagacacgcttatgatcagccgcacgccagaggtgacctgtgtggtagtcgacgtctcacaggaagatcctgaggttcagttcaactggtatgtggacggtgtggaggtgcataacgccaagacaaaacctagagaagagcagttcaactctacctatcgagtggtgagtgtgctgactgtgttgcaccaggattggctgaatgggaaggagtataagtgcaaagtgtctaacaagggcctgccttcttcaatcgagaaaactatctcgaaggcgaagggccagcctcgggagccacaggtgtacaccttgcctcccagccaagaagagatgacgaaaaatcaggtgtccctcacttgcctcgttaagggcttttaccccagcgatatcgctgtggagtgggaatcaaatggacagcccgagaacaactacaaaaccaccccccctgtcctagactccgacgggtccttcttcctgtattcaagactgactgtcgataagagccggtggcaagagggaaatgtcttctcgtgtagcgttatgcatgaggccctgcataatcactacacccagaagagcctgtccctttctttgggc

SEQ ID NO: 15673 - DNA, 897 bp, synthetic construct
  misc_feature 1..897: note = source = /note="Description of Artificial Sequence: Synthetic coding sequence"
  source 1..897: mol_type = other DNA
atgaaatgggtgtcgtttatctcactgctcttcctcttcagcagcgcatacagcggatccctggataagaggcatggtgaagggacctttacttcggacgtgagcagctatctcgaggaacaagctgcgaaggagtttatagcctggctggtgaaagggggaggcggcggaggaggttctggtggaggtgggtctggtggcggaggatccgccgaaagcaaatacggccccccttgtcctccctgcccagcaccagaggcagcgggaggtccgtccgtgtttcttttcccacctaagcctaaggacaccctgatgattagcagaacgccagaggtgacttgtgtcgtcgtcgatgtgtctcaggaagatcccgaagtccaattcaactggtatgtcgacggtgtggaggtccataacgccaagactaaacctcgagaggaacaattcaacagcacctaccgagttgtgtcggttctgaccgtgcttcaccaagattggctcaatgggaaggaatacaagtgcaaagtttcgaacaagggccttccttcttctattgaaaagacgatctcgaaggccaaaggccagcctcgggagccacaagtgtacaccctgcctccctcgcaagaagaaatgaccaagaatcaggtgtccctgacttgtcttgtgaaaggattttacccttcggatatcgcagtcgaatgggaatcaaacggacagcccgagaataactacaaaacgactcctccagtgttggatagcgatgggtcgtttttcctgtactcgcgcctgactgtggacaagtccagatggcaggaaggaaacgtgtttagctgtagcgtgatgcatgaggcacttcataatcactacactcaaaagtccctctcactctcactcggt

SEQ ID NO: 15674 - DNA, 897 bp, synthetic construct
  misc_feature 1..897: note = source = /note="Description of Artificial Sequence: Synthetic coding sequence"
  source 1..897: mol_type = other DNA
atgaagtgggtctctttcatatcattgttgtttctctttagcagcgcatattccggctccctcgataaaagacatggggaaggcactttcacatcagatgtatcatcctacttagaagaacaagcggcaaaggagttcatagcctggcttgtaaagggaggcggtggaggtggcggcagtgggggtggaggaagtggtggtggggggtcagctgagagtaagtatggccctccttgccctccttgtcctgcacctgaggccgctggtggtccatctgtcttcctcttcccaccaaagcccaaagataccttaatgatttcgaggactcctgaggtcacttgcgtggttgttgatgtttctcaagaagaccctgaggtccagttcaattggtatgtagatggagttgaagtgcataatgccaaaaccaaacctagagaagagcagtttaatagtacatatcgagttgtgtctgtgctgaccgtccttcatcaagattggctcaacgggaaagaatataagtgcaaggtgagtaacaagggacttccgtctagcatagaaaaaacgatttccaaagcgaaaggccaaccacgcgaaccccaagtgtatactttaccaccttcacaagaagaaatgaccaagaaccaggtatcattgacctgccttgttaaaggtttctatccatcagacattgccgttgaatgggagagcaatggccaacctgaaaacaattacaagacgactccacccgttctggattctgatggttctttctttctttacagccgtcttacggtggacaagagtcgttggcaagagggaaatgtcttctcctgctccgtgatgcacgaggcacttcacaaccattatactcaaaaatctctatctctctctttggga

SEQ ID NO: 15675 - DNA, 897 bp, synthetic construct
  misc_feature 1..897: note = source = /note="Description of Artificial Sequence: Synthetic coding sequence"
  source 1..897: mol_type = other DNA
atgaagtgggtttcatttatctcccttctttttctgtttagttctgcctattcagggtcattggataaaagacatggtgaaggcacattcacatcggatgtaagctcatatttagaggaacaggctgccaaagaatttatagcgtggttagtcaaaggtggtggaggaggagggggatctggaggggggggaagcggaggaggggggagcgccgagtcaaagtacggcccaccctgtcccccctgcccggcgccggaagctgccggaggcccttctgttttcttatttcctccaaaacccaaagatacgcttatgatcagccggacgccggaggttacctgtgtagttgttgacgtcagccaagaggacccagaagtccaatttaactggtatgtggacggagtggaagtccacaatgccaagacgaaacctcgcgaagaacaattcaactccacctatagagtggtttccgtgttaacagtgcttcatcaggactggcttaacggcaaagaatataaatgtaaggtgtcaaacaagggactgccgtcatccattgaaaaaaccatttcaaaggccaaaggacagccacgagaaccgcaagtctatacgctgcctccgtcacaggaagagatgacaaagaaccaggtcagcttaacttgtctggtgaaagggttttatccgagtgatatcgctgttgagtgggaaagcaatggacagcccgagaacaactataaaacaaccccgcctgtgcttgattcggatggttcctttttcctctatagcaggttaacagtcgataaaagcagatggcaagaaggaaatgtatttagttgtagcgttatgcacgaggcacttcataatcattatacgcaaaaatcattaagcctgtcattaggt

SEQ ID NO: 15676 - DNA, 897 bp, synthetic construct
  misc_feature 1..897: note = source = /note="Description of Artificial Sequence: Synthetic coding sequence"
  source 1..897: mol_type = other DNA
atgaaatgggtatcgtttatatcgctattatttttattttcgtcggcgtattcgggttcgctagataaacgtcatggtgaaggtacgtttacgtcggatgtttcgtcgtatctagaagaacaagcggcgaaagaatttatagcgtggctagttaaaggtggtggtggtggtggtggttcgggtggtggtggttcgggtggtggtggttcggcggaatcgaaatatggtccgccgtgtccgccgtgtccggcgccggaagcggcgggtggtccgtcggtttttttatttccgccgaaaccgaaagatacgttaatgatatcgcgtacgccggaagttacgtgtgttgtagtagatgtttcgcaagaagatccggaagttcaatttaattggtatgtagatggtgttgaagtacataatgcgaaaacgaaaccgcgtgaagaacaatttaattcgacgtatcgtgtagtttcggtactaacggtattacatcaagattggctaaatggtaaagaatataaatgtaaagtatcgaataaaggtttaccgtcgtcgatagaaaaaacgatatcgaaagcgaaaggtcaaccgcgtgaaccgcaagtttatacgttaccgccgtcgcaagaagaaatgacgaaaaatcaagtttcgttaacgtgtttagtaaaaggtttttatccgtcggatatagcggtagaatgggaatcgaatggtcaaccggaaaataattataaaacgacgccgccggtattagattcggatggttcgttttttttatattcgcgtctaacggtagataaatcgcgttggcaagaaggtaatgtattttcgtgttcggtaatgcatgaagcgttacataatcattatacgcaaaaatcgttatcgctatcgctaggt

SEQ ID NO: 15677 - DNA, 897 bp, synthetic construct
  misc_feature 1..897: note = source = /note="Description of Artificial Sequence: Synthetic coding sequence"
  source 1..897: mol_type = other DNA
atgaagtgggtgtcgtttatctctctgctgtttctgttttcgtctgcatatagcggctcattggataagaggcatggcgaaggtacattcacaagcgacgtgtcctcttacttagaggaacaggctgcgaaagagttcatcgcgtggttagtgaaaggaggtgggggtggggggggatctggtggcggggggtccgggggcggcggctctgcagaatctaagtacgggcctccctgtcccccctgtcccgcccctgaggccgcgggaggaccttccgtgttcctgtttccccccaagcccaaggatacccttatgatttctcgtacccccgaggtaacatgtgtcgtggtggatgtcagtcaggaggatccagaggtccagttcaattggtacgttgacggcgtggaggttcacaatgccaagacgaaaccaagggaggagcagttcaactccacctaccgcgtggtttcagtcctcacagtgctgcaccaggactggctgaatgggaaagaatacaagtgcaaggtctctaacaaaggtctgccatccagtatagagaagacgattagcaaggccaagggtcagccgagggagcctcaggtctatacgctccccccctctcaggaagaaatgactaaaaaccaagtcagtctgacctgccttgtgaaaggcttctatccctccgacattgcggtagaatgggagagcaacggtcagcccgaaaataattataagacaactcccccagtcctcgattctgacggatcattcttcctgtactcacgtctgactgtcgacaagagccgctggcaggagggcaacgttttcagttgctcagtgatgcatgaggcgttgcacaatcattatacccagaagtctcttagcctgagcctcggg

SEQ ID NO: 15678 - DNA, 897 bp, synthetic construct
  misc_feature 1..897: note = source = /note="Description of Artificial Sequence: Synthetic coding sequence"
  source 1..897: mol_type = other DNA
atgaagtgggtgtctttcattagtctcctttttctgttttcatcagcatacagcggctcgctcgataagaggcatggagagggcacttttacttcggatgtcagcagctacctggaagagcaggcagcaaaagaattcatcgcgtggctcgtgaagggtggcgggggaggaggaggaagcggtggtggtggatcgggaggcggggggtcggctgaatctaagtacggtccgccctgtcctccttgcccggccccggaagcggccggcggcccctccgtctttctctttcctcccaaaccaaaggacactcttatgattagccgcacgccagaggtgacttgtgtggtcgttgacgtcagccaggaagatccagaggtgcagtttaactggtacgtggacggtgtcgaggtgcacaacgcaaaaacgaagcctagagaagagcagttcaactcaacgtacagggtggtgagcgtccttactgtgttgcaccaggactggctgaatggaaaggaatacaagtgcaaagtctcaaacaagggccttcctagctcaattgagaaaactatttccaaagcaaagggacaaccccgggaacctcaggtgtacaccctgcccccttcgcaagaagagatgaccaagaaccaagtgtcactcacttgtttggtgaagggattctacccatccgacattgcagtcgaatgggaatcgaatgggcagcctgaaaacaactacaagaccacgccacccgttttggactcagacgggagcttctttctctactcgagactgactgtggataaatcacgctggcaagaggggaacgtcttttcatgtagcgtgatgcacgaggctcttcataaccattacactcaaaagtccctctcgttgagcctggga

SEQ ID NO: 15679 - DNA, 897 bp, synthetic construct
  misc_feature 1..897: note = source = /note="Description of Artificial Sequence: Synthetic coding sequence"
  source 1..897: mol_type = other DNA
atgaaatgggtgagcttcatctctctgctatttctgttctccagcgcttacagcggtagcctcgataaaaggcacggtgaaggcaccttcaccagcgatgtgagcagttacctagaagagcaggcggcaaaggagtttattgcctggctggtcaagggaggtgggggcggtggtggtagcggtggtggtggtagcggtggaggaggaagcgcggaatccaagtatggcccgccatgtccaccatgcccagcaccggaagcagccgggggcccatctgtcttccttttccctccgaagccaaaagacacattgatgatcagcaggactccggaagttacgtgtgtggtcgttgatgtgagccaagaggatcctgaggtgcaattcaattggtacgtcgacggcgttgaggtgcacaacgctaagacgaagccacgcgaggagcagtttaactccacttatcgggttgttagcgtcctgaccgtcttacaccaggactggctgaatgggaaagaatataaatgcaaagtgtccaataaagggctgcccagttctattgaaaagaccatcagcaaagcaaagggtcagccgcgcgagccgcaggtctacacactcccgccaagtcaggaggaaatgaccaaaaaccaagttagcctgacctgtttggtcaaaggcttctacccgagcgacattgcggttgagtgggaatcaaacggccagccggagaataactataaaacaacgcccccggttcttgatagcgacggaagcttcttcctttatagcaggctgaccgttgacaagagccgatggcaagaaggcaacgtgttcagctgttcggtaatgcatgaagccctgcataatcactatacccagaaatcgctgagcctgagcctgggg

SEQ ID NO: 15680 - DNA, 897 bp, synthetic construct
  misc_feature 1..897: note = source = /note="Description of Artificial Sequence: Synthetic coding sequence"
  source 1..897: mol_type = other DNA
atgaagtgggtgagtttcattagtctccttttcctgttctccagcgcctattcagggtccctggataaaaggcacggggaaggaacgtttacttcagacgtctcgtcctatctcgaggaacaggctgccaaagagttcatcgcgtggctggtcaagggcggagggggaggcgggggaagcgggggcggcgggagcgggggtggcggatctgccgaaagtaagtacggacctccgtgcccaccgtgccctgcaccggaggcggcagggggcccttccgtgttcctctttccgcccaaacctaaggacactctgatgatctcccggactccggaagtcacctgtgtcgtcgtcgatgtttcacaggaggacccggaagtgcaattcaactggtacgttgatggagtcgaagtccacaacgctaagacgaagccgcgggaggagcagtttaactcaacttaccgcgtggtgtcagttctgacggtccttcatcaggattggcttaatggaaaagagtacaagtgtaaggtgtccaacaagggactcccatcgagcattgaaaaaaccatctcgaaggccaagggtcaaccaagagagccgcaagtgtacactctgcctccctcccaggaagaaatgaccaaaaatcaggtgtccctgacgtgcctggtcaaaggtttctacccatccgacatcgccgtagaatgggaatcgaacggtcaaccggaaaacaattacaagaccactcccccagtgcttgacagcgacggatcattcttcctgtactcgcgcttgaccgtggacaagtcacgttggcaggagggtaatgtgttttcttgcagcgtgatgcatgaagcgctgcacaaccactacacccagaagtcgctctcgctctcactggga

SEQ ID NO: 15681 - DNA, 897 bp, synthetic construct
  misc_feature 1..897: note = source = /note="Description of Artificial Sequence: Synthetic coding sequence"
  source 1..897: mol_type = other DNA
atgaaatgggtgtccttcatatcactactttttctgttttctagcgcctactcaggatccttggataagcggcacggtgaagggaccttcaccagtgacgttagttcctatctggaggaacaggcagccaaagagtttatagcctggctggtgaagggcggcggcggcgggggaggctctgggggaggagggtctggcggcggcggcagtgcagagagcaaatacggcccaccttgtccaccatgtcccgcccctgaagccgctggcggcccatctgtcttcctgttcccacccaagcctaaggataccctgatgattagccgaacacccgaggtgacttgcgtggtcgtagacgtgtctcaggaggatccagaggtccagttcaactggtatgtcgacggtgttgaagtgcacaacgctaagactaagcctagagaagagcagtttaacagtacctaccgcgtggtgagcgtgttaaccgtactgcaccaagattggctgaacggcaaagaatataagtgcaaagtctctaataagggcttaccctcttccattgagaagactatatccaaggcaaaggggcaaccacgagagccacaggtgtatacactgccaccatcacaggaggagatgaccaaaaaccaggtcagtttaacatgtctggttaaaggcttctacccttcagatatagccgtggaatgggaatccaatgggcagccagagaacaattataagacaacccccccagtcctggactcagatgggagtttctttctgtacagcaggctgaccgtggacaaatcccgatggcaagagggtaacgtattttcctgcagtgttatgcacgaggccctccacaaccactacactcagaagtccctgtccctcagtctcgga

SEQ ID NO: 15682 - DNA, 897 bp, synthetic construct
  misc_feature 1..897: note = source = /note="Description of Artificial Sequence: Synthetic coding sequence"
  source 1..897: mol_type = other DNA
atgaaatgggttagctttatctcccttctctttcttttttctagtgcgtatagtggatcactcgacaagagacatggtgaagggacttttactagcgacgtgagcagctatctggaggagcaggccgcaaaagagttcattgcctggttagtgaagggcgggggtggcgggggaggttcagggggcggcggatcaggaggcggcggttctgcagagtccaaatacggccctccctgtccaccctgccctgcgcctgaggcggctggtgggccgagcgtatttctgtttccccccaagcccaaggatactttgatgattagccgtacgcctgaagttacttgtgtggtggtggatgtttcccaggaggaccccgaggtgcagttcaactggtatgtcgatggcgtagaggtccataacgccaagaccaagccaagggaggagcagtttaattcgacgtatagggtggtatccgtgttaaccgtcctgcaccaggattggctcaatggaaaggagtataagtgcaaagtctcaaacaaaggactccccagcagcatcgagaagactatcagcaaagccaaagggcaacctcgcgaaccacaagtttacaccctgcctccatcccaggaggagatgactaagaaccaggtaagcctgacgtgcctggtgaaggggttttacccctccgacatcgcggtggagtgggagtcaaacggtcagcccgagaataactataagaccacgcctccagtacttgactccgatggctccttttttctgtatagtcgcctcacggtggataagagtaggtggcaggaggggaacgtcttttcctgtagcgtgatgcacgaagctcttcacaaccactacacgcagaagagtttatcgttaagtctcgga

SEQ ID NO: 15683 - DNA, 897 bp, synthetic construct
  misc_feature 1..897: note = source = /note="Description of Artificial Sequence: Synthetic coding sequence"
  source 1..897: mol_type = other DNA
atgaaatgggtcagtttcatttcactgctgttcctgttcagttcagcatactccggaagcctggacaagcggcatggagaagggaccttcaccagcgatgtttcaagctatctggaggaacaagctgctaaggagtttattgcatggcttgtcaagggaggaggcggagggggtggctctggcggaggaggatctggtggagggggctcagctgagtccaagtacggaccaccctgcccgccatgcccggcccctgaagcggctggagggccatctgtgttcttgttccctcccaagcctaaagacactttgatgattagtcgtactcccgaagtaacgtgtgtcgtggtggacgtgtctcaggaagacccagaagtgcagtttaactggtacgtagacggtgttgaggtccacaacgcaaaaactaagccccgtgaagaacaatttaactcaacatatcgggtggtctctgtgctcactgtcctgcaccaagattggttgaatggaaaagagtataaatgcaaagtgtcaaacaaagggttgccatcctctatcgagaagacaatttccaaagcaaagggccagccaagagaacctcaggtctacacgttgccacctagccaggaagagatgacgaagaatcaggtcagcctgacctgtctggttaaagggttttatccatctgatattgctgtagagtgggagagcaacggacaacctgagaacaactataagacaacaccacctgtgctggatagtgacgggtcgttttttttgtactccaggctcacggtcgataagagccgatggcaggagggcaacgtgttcagttgctcagtgatgcatgaggcactgcataatcactacactcaaaagtctctcagtctatcccttgga

SEQ ID NO: 15684 - DNA, 897 bp, synthetic construct
  misc_feature 1..897: note = source = /note="Description of Artificial Sequence: Synthetic coding sequence"
  source 1..897: mol_type = other DNA
atgaagtgggtcagcttcatcagcctgctatttctgttctccagcgcttacagcggaagtctggacaagcggcacggtgaggggacctttacctcagacgtatcctcctacctggaggagcaggcagccaaggaattcatagcatggctcgtgaaaggcggcgggggcggaggcggatccggaggtggaggctctgggggggggggctctgcagagtctaagtacgggcctccctgtcctccttgcccagcccctgaggccgcgggcggccctagcgtgttcctgttcccccccaagccaaaggacacactgatgatttcaaggacccctgaagtgacatgtgttgtagtggacgtgagccaggaagatccagaagtgcaatttaactggtatgtagatggagttgaagtgcacaatgcgaagaccaaacctcgggaggagcaattcaatagcacttaccgggtggtgtcggtcctcacggtgctgcaccaagactggctgaatggaaaggagtataaatgcaaggtctctaataagggattaccctcatctattgaaaaaacaatttccaaggccaaaggccagcccagggaaccccaggtgtatactctgcctccttcgcaggaggagatgaccaaaaatcaggtctctttgacctgcctagtgaagggattctacccttccgatatcgcagtggagtgggaatcaaatggccagcccgaaaacaattacaaaacgacaccccccgtgctggatagcgacggcagtttcttcctgtactcaagattaaccgttgataaaagtaggtggcaggagggaaatgtcttcagttgtagtgtgatgcatgaggcactccataaccactacacgcaaaagtcccttagtctctctcttgga

SEQ ID NO: 15685 - DNA, 897 bp, synthetic construct
  misc_feature 1..897: note = source = /note="Description of Artificial Sequence: Synthetic coding sequence"
  source 1..897: mol_type = other DNA
atgaaatgggtgagcttcatctcccttctgtttctgtttagctcggcgtactcgggctccctcgacaagcgtcatggcgagggcacttttacttcagacgtgtcatcctatctcgaggagcaggcagcaaaggagttcatagcatggctggtcaaaggtgggggcggaggcggaggatcgggaggagggggttcgggtggaggcggttcggctgagtcgaagtacgggcccccttgcccaccttgccctgcccccgaagccgcaggaggtccatccgtgtttctgttcccgcctaaaccaaaagataccctgatgatttccagaacccctgaagtgacctgcgtggtcgtcgatgtgtcgcaagaagatccagaagtccagtttaactggtatgtcgatggagttgaggtgcataacgcgaaaacgaaaccaagggaagaacaattcaatagcacttatcgagttgtgagcgtgcttactgtgctccatcaagactggcttaacggcaaggagtacaaatgcaaggtgagcaacaagggactccccagcagcattgaaaagaccatctctaaagccaaggggcagcccagagaacctcaagtctacaccctcccgccgtcgcaagaggaaatgaccaagaatcaggtgtcgcttacctgcctggtcaaggggttttacccatcagatattgcagtggaatgggagagcaatggccaacccgaaaacaattacaagactactcctccagtccttgacagcgacggtagcttctttttgtacagccgactgacggtggataagtcccggtggcaggaagggaatgtgttttcgtgttcggtgatgcatgaggccctgcacaaccactacactcagaaatcactttcactcagcctgggg

SEQ ID NO: 15686 - DNA, 897 bp, synthetic construct
  misc_feature 1..897: note = source = /note="Description of Artificial Sequence: Synthetic coding sequence"
  source 1..897: mol_type = other DNA
atgaagtgggtgtctttcatcagcctgctcttcctcttctcgtcggcgtactccggctccctggataagcgccacggagaaggaacgttcacttctgacgtgtcgtcgtaccttgaggagcaggctgccaaggaattcatcgcctggttggtgaaaggaggaggcggcggaggggggagcggcggaggaggctcgggtgggggaggtagcgccgagtcaaagtacggaccgccatgccctccatgcccggccccagaggcagctggagggccaagcgtttttctgtttccgccgaagcctaaagatactctcatgatctctcggaccccggaagtgacttgcgtggtcgtggacgtctctcaggaggaccccgaagtgcagttcaactggtacgtggatggcgtcgaggtgcacaatgcaaagactaagccgcgggaagagcaattcaattcaacctaccgcgttgtctcggtcctgactgtcctccaccaggactggctgaacgggaaggagtacaagtgcaaggtgtcgaacaaaggactcccgtcatccattgagaaaactatatcgaaagccaagggtcagccgcgtgaaccgcaagtctacaccctgccaccttcccaagaggaaatgaccaagaaccaggtgagcctgacctgtctggtgaaaggtttctatccatcggacatcgccgtcgaatgggagtcgaatggtcagccggagaacaactacaaaaccactccaccagtcttggactcggatggttcgttcttcctctactcaaggctgaccgtcgacaaatccagatggcaggagggtaatgtgttctcatgctcggtgatgcacgaagcgctgcataaccattatacccagaagtcgttgtccctgtccctcggc

SEQ ID NO: 15687 - DNA, 897 bp, synthetic construct
  misc_feature 1..897: note = source = /note="Description of Artificial Sequence: Synthetic coding sequence"
  source 1..897: mol_type = other DNA
atgaaatgggtatctttcattagtctgctttttttgttttctagcgcatatagtgggagcctggacaaacgtcacggcgaggggacctttacctctgacgtttcctcgtacttggaggagcaggccgcgaaagagtttattgcgtggctggtgaaaggggggggtggcggcggaggatctggcggtgggggctcaggagggggcggctccgcggaaagcaagtatggcccaccgtgccccccttgtcccgcccctgaggccgcaggcggccccagtgtgtttctgtttcctccgaaaccgaaagacacactgatgatcagcagaaccccagaagtgacctgtgttgtggtggacgtgagtcaggaggatccagaggtgcagttcaactggtatgtcgacggcgtagaagtccacaatgccaagacgaaaccacgggaggagcaattcaactctacgtaccgcgtggtctcggttctcactgtactgcatcaggactggctcaacgggaaggaatataaatgcaaggtgagcaacaagggtctgcccagctctatcgaaaaaacgatcagtaaggccaaaggtcagccccgcgaaccacaagtgtatacactcccccccagtcaagaggaaatgaccaagaaccaggtgagcctgacgtgcctcgtgaaaggcttttatccaagtgatattgctgtggagtgggagagcaatgggcagccagagaacaactacaaaacaacccctcccgtgttggacagcgacgggtctttcttcttatacagcaggctcacagttgacaaatccaggtggcaggagggaaatgtgttttcctgtagcgtcatgcacgaagccctgcataaccattatacgcagaaatccttgagcttgagtttaggg

SEQ ID NO: 15688 - DNA, 897 bp, synthetic construct
  misc_feature 1..897: note = source = /note="Description of Artificial Sequence: Synthetic coding sequence"
  source 1..897: mol_type = other DNA
atgaaatgggtgtcgttcatttcgctgctctttctcttttcttccgcttactccggcagcctggacaaacggcacggcgagggcacttttacctcagacgtgagctcatacctcgaggagcaagcggccaaagagtttattgcatggttggtgaagggtgggggtgggggtggcgggagcggcggcggggggagtggaggcgggggcagtgccgagagtaaatacggtccaccctgcccaccttgcccagcccctgaggctgctgggggaccaagcgtttttctctttccgcctaaacccaaagatacactgatgatttcccgcactcctgaagtgacctgcgtggtggtggatgtcagtcaggaagaccctgaggtccagttcaactggtatgttgacggtgttgaagtgcacaacgccaagactaaacctagggaggagcagttcaatagtacatatagagttgtaagcgtcctgacggtcctccaccaggactggttgaacggaaaagagtataagtgtaaggtctccaataaagggctccctagctccatagagaaaactatcagcaaggcaaaaggacagccccgtgagcctcaggtttacaccctgccacctagccaggaagaaatgaccaagaaccaggtctcattgacgtgcctcgtcaagggtttttatccttccgatattgctgtggaatgggaaagcaacggacaacctgaaaataactacaaaacaactccaccggttcttgatagcgatgggtcattcttcctgtatagccgacttacagtagataaaagtaggtggcaagagggcaatgttttttcatgcagcgtgatgcacgaagcattgcacaatcattatacgcagaaatcactgtcactctccttgggc

SEQ ID NO: 15689 - DNA, 897 bp, synthetic construct
  misc_feature 1..897: note = source = /note="Description of Artificial Sequence: Synthetic coding sequence"
  source 1..897: mol_type = other DNA
atgaaatgggtttctttcatttccttactgttcttgttcagctctgcctactctggtagcctggataagagacacggggaggggacatttacctcagacgttagctcttatctggaggaacaggcggccaaggagttcattgcctggttggtaaaaggcggtgggggaggggggggctccggcggtggtggaagcggcggcgggggctcagccgagagcaagtatggacccccgtgtccgccctgcccagcgccagaggccgctggagggccgtctgtctttctgtttccaccaaagcctaaggacacccttatgatctcgcgtacaccggaggtcacctgtgtggtagtggatgtcagccaggaagatcctgaggtccagtttaactggtatgtggacggcgtggaggtgcataacgctaagactaaaccgcgagaggaacagttcaattctacgtatcgggtggtgtctgttctgacagtgttgcaccaggactggcttaacgggaaagagtataagtgcaaggtgtcgaataagggtcttccaagcagcatcgagaagaccatcagtaaggccaagggtcagccccgggagcctcaggtttacacgttgccgcccagccaggaggagatgactaagaaccaggtctctttaacctgcctggttaaggggttctatccgtcagatatcgcagtggagtgggagtctaacggccagcccgaaaataattataaaacaacccccccagtgctcgattcggacggcagcttcttcctgtattcccgtctgactgtggataagtcgcggtggcaggagggaaatgtgttctcttgttctgtgatgcacgaggctctgcacaatcattacacacagaagtctctatcactgagcctggga

SEQ ID NO: 15690 - DNA, 897 bp, synthetic construct
  misc_feature 1..897: note = source = /note="Description of Artificial Sequence: Synthetic coding sequence"
  source 1..897: mol_type = other DNA
atgaaatgggttagctttatatcactgctgttcctattctcaagcgcctactccggatccctggataagcgacatggcgagggaaccttcacctcagatgtgtcttcctacctggaggagcaggctgcaaaggagtttattgcctggcttgtgaagggaggcggcgggggggggggttctggcggaggtgggtccggaggcggcggtagtgccgaatccaagtatggccccccctgcccaccctgtcctgcacccgaagcagctggcggaccctctgtgtttttgttcccacccaagcctaaagataccctgatgatttcccgaacccccgaggtgacttgcgtggtcgtagatgtatctcaggaggatccggaggtgcagtttaattggtacgtagatggggtagaggtccacaacgctaagacaaagccgcgagaagagcagttcaattctacttatagagtggtgtcagtcctgaccgtgctacaccaggattggctgaacggaaaggaatacaagtgtaaagtgagcaataaagggcttcccagcagcattgagaaaacaattagcaaagctaagggccaacctagggaacctcaggtatacaccctgccccctagccaggaggagatgactaaaaaccaggtctctttaacatgcctggtcaagggcttctatccctctgacatagctgtcgagtgggagtccaacgggcaacccgagaataactataagaccaccccacccgtgttggacagcgatgggagcttctttttatacagccgcttgacagtcgacaaatctagatggcaagagggaaatgtcttctcatgtagcgtcatgcacgaggcattgcacaaccactacactcagaaaagcttatctctgtcactgggt

SEQ ID NO: 15691 - DNA, 897 bp, synthetic construct
  misc_feature 1..897: note = source = /note="Description of Artificial Sequence: Synthetic coding sequence"
  source 1..897: mol_type = other DNA
atgaagtgggtgtccttcatatcactgctcttcctgttcagcagtgcttatagcggcagtctggacaagcgacacggagagggaacttttacttccgatgtgagctcatatttggaggaacaggccgctaaggaattcatcgcctggttggtgaaaggcggggggggaggtggcggctctgggggagggggtagcggaggaggaggatctgcagaatcaaagtacggaccaccgtgtcctccttgtcccgctccagaggccgcaggcggaccatctgttttcttgttcccgcctaaacccaaagacacactcatgatctcgcgcacgcccgaagtcacatgtgtggtcgtggacgtctcccaagaggatccagaagttcagttcaactggtatgtagatggggttgaggtccataatgctaaaacaaaaccaagagaagagcaattcaatagtacctaccgcgtggtgtctgttctgactgtacttcaccaggactggctcaatggcaaggagtacaagtgcaaggtgtcgaacaaagggctcccttcttcgatcgagaagactattagtaaggctaagggtcaaccgagggaaccacaagtgtatactctgccaccttcccaggaggagatgactaaaaaccaggtgagcctgacctgcctggtgaaaggcttctatcccagcgacatcgctgtcgagtgggagtccaatgggcagcctgagaataattataagaccacaccgccggttttggatagcgatggctcttttttcctttacagtcgtctgacggttgataagagtcgatggcaggaagggaacgttttctcatgctccgtcatgcacgaggcgctgcacaaccactacacccagaagtcacttagcttgagcctcggg

SEQ ID NO: 15692 - DNA, 897 bp, synthetic construct
  misc_feature 1..897: note = source = /note="Description of Artificial Sequence: Synthetic coding sequence"
  source 1..897: mol_type = other DNA
atgaagtgggttagctttatctccctgctctttctgttttccagcgcttatagcgggagtctggacaaaagacatggcgagggcacatttacaagcgacgtttctagttacctggaagaacaggctgcgaaggagtttattgcatggttggtgaagggaggagggggcggaggaggaagtggaggcggcggatccggtggcggtggaagcgcagagtcgaaatatggcccaccttgtcctccctgccctgctccggaggccgcaggtggcccctcagtttttctgtttcccccgaaaccgaaggacacactcatgatttcacggaccccagaagttacttgtgtggtcgttgatgtcagtcaggaagaccctgaggtacagtttaattggtatgtcgacggagtggaagttcataacgctaaaaccaagcccagagaagagcagttcaacagtacttacagggtggtgagcgtcctgactgttctccatcaggattggcttaatggcaaggagtacaaatgcaaggtgagtaataagggcctgcctagctctatcgagaagactatctcaaaggcaaaaggtcagccacgagaacctcaggtgtacacactgccacccagtcaggaagagatgaccaaaaatcaagtgagccttacctgccttgtcaaggggttctatccaagcgatatcgctgtcgagtgggagagcaatgggcaacctgaaaacaattacaagactactccccccgttttggattccgatggttccttctttctgtactcccggctgaccgtcgacaagtcaaggtggcaggagggcaatgtgttctcttgcagtgtgatgcacgaggctctgcacaaccattatactcagaaatcacttagcttgagcctagga

SEQ ID NO: 15693 - DNA, 897 bp, synthetic construct
  misc_feature 1..897: note = source = /note="Description of Artificial Sequence: Synthetic coding sequence"
  source 1..897: mol_type = other DNA
atgaagtgggtcagcttcatctccttgcttttcttgttcagcagcgcatattccgggtccctggacaagaggcacggtgagggaactttcacttcggatgtgtcttcatatctggaggaacaggctgcgaaggagttcatagcgtggctcgtaaaggggggcggcggcgggggcggaagcggaggaggtggctcaggggggggagggtcggccgagtctaagtacgggcctccctgccccccgtgccctgccccggaagcagctggggggccatctgtgttcctcttcccgcccaagcctaaggacactcttatgattagtcgaacaccagaggtcacttgtgtcgtggtcgacgtcagccaggaagaccccgaggttcagtttaattggtacgtggatggcgtggaagttcacaacgcaaaaacaaagcccagagaggaacaattcaatagcacgtatcgcgtcgttagcgttcttacagtgctgcaccaggactggctgaacggcaaggagtacaaatgcaaggtgtccaataaggggttgccgtccagtattgaaaagactatttcaaaagccaaagggcagccaagggaacctcaggtttataccctgcctccttcacaggaggagatgacaaaaaaccaggtaagcctgacctgccttgtgaaagggttctatcccagtgatattgccgtagagtgggagagtaacggtcagcccgagaacaactacaagacaactccacccgtgctggatagcgacggctcattcttcctttattcgcgcctgaccgtggataagagtaggtggcaggagggaaacgtcttcagttgctctgtgatgcacgaggcgctgcacaaccattacacccagaagtccctgagcctgtcattggga

SEQ ID NO: 15694 - DNA, 897 bp, synthetic construct
  misc_feature 1..897: note = source = /note="Description of Artificial Sequence: Synthetic coding sequence"
  source 1..897: mol_type = other DNA
atgaagtgggtcagtttcattagcctgctcttcctcttcagcagcgcgtacagcggctccctggacaagcgccacggagagggaaccttcaccagcgacgtgagctcatacctggaggagcaggcagcaaaggaatttatcgcatggctggtcaagggaggaggaggaggtggaggatcggggggcggggggtcaggaggtggcggatccgcagagagcaagtacggcccgccgtgcccgccgtgtccggcacctgaggccgccggtggaccgtcggtcttcctctttccaccgaagcctaaagacaccctgatgatcagcagaactcctgaagtcacgtgtgtggtcgttgatgtgtcccaagaagacccggaggtgcagtttaattggtatgtggacggagtcgaggtgcacaacgccaagaccaaaccgcgcgaagagcagttcaattccacttacagagtggtcagcgtgctgaccgtgctgcaccaggattggctgaacggaaaggagtacaaatgcaaggtcagcaataaggggctgccgtcctcgatcgaaaaaactatttcaaaggcgaagggacaaccccgggaaccacaggtgtacactctgccaccctcccaggaagaaatgactaagaaccaagtctcacttacttgcctggttaaggggttttacccttctgacatcgcggtggagtgggaaagcaacggtcagccggaaaacaactacaagaccactcccccagtgctggacagcgatggttccttcttcctgtactctaggctgacggtggacaagtcgcggtggcaggagggcaacgtgtttagctgctccgtgatgcatgaagcactgcataaccattacacccagaagtcgctgtcgctgagcctcggt

SEQ ID NO: 15695 - DNA, 897 bp, synthetic construct
  misc_feature 1..897: note = source = /note="Description of Artificial Sequence: Synthetic coding sequence"
  source 1..897: mol_type = other DNA
atgaagtgggtatctttcatttccttgctgttcctgttctcctccgcatacagcggaagtctggacaagaggcatggcgagggcacattcactagtgacgtttcctcctatttggaagagcaggccgcaaaagaattcatcgcttggctggtaaagggagggggaggtggcggaggctcaggcggcgggggcagcggcggcggcggctcagctgaaagtaagtacggccctccttgtccaccttgtcctgctccagaagctgccggaggcccatctgtgtttttattccctcccaagcccaaggatacacttatgatttccaggactcctgaggtcacctgtgtagtcgtggatgtatcacaagaggaccctgaagtccagttcaattggtatgtcgatggtgttgaagtccacaatgccaagaccaagccgcgggaggagcaatttaattccacttatcgtgtcgtgtcggttctcacagtattacaccaagactggcttaacggcaaggagtataaatgtaaggtgtcaaacaagggcctcccatcctccatcgagaaaaccatatcaaaggctaaaggccaaccgagggagccacaggtgtacaccttgccaccatctcaggaggaaatgaccaagaatcaggtctctctgacctgcctggtgaaggggttctatccaagcgacatcgccgtggagtgggagtctaatggccagcccgagaataattataaaacaacgccccccgtccttgacagcgatggaagcttttttctgtactcccggctgaccgtggataagagtagatggcaagagggaaacgtgttttcgtgttctgtgatgcacgaggctttgcataatcattacactcagaaaagcttatcgctcagcttaggc

SEQ ID NO: 15696 - DNA, 897 bp, synthetic construct
  misc_feature 1..897: note = source = /note="Description of Artificial Sequence: Synthetic coding sequence"
  source 1..897: mol_type = other DNA
atgaagtgggttagttttattagcctgttgttcttattcagttccgcgtactccggatccctggataaaaggcatggcgaaggaacctttacaagcgacgtcagcagctatctcgaagagcaggcagccaaggagttcatagcctggctcgtaaagggcggagggggaggggggggcagtggcggaggggggagtggtggtgggggcagtgccgagtctaagtacggccccccctgcccaccttgccccgctcccgaagccgccgggggaccctccgtttttctctttccacccaaacctaaggatactctcatgattagcagaacacctgaggttacctgcgtggttgtcgatgtctcccaggaggatcccgaggtgcagttcaattggtacgttgatggggtggaagtgcacaatgccaagaccaaaccacgggaagagcagttcaattctacttatagagttgtgagtgtactgacagtgcttcaccaagattggctaaacggcaaagaatacaagtgcaaagtctccaacaaaggactaccttcaagcattgagaagactatctcaaaagcgaaagggcagccacgagagccccaagtgtatacactgcccccctcacaggaagaaatgaccaagaaccaggtctccttgacttgcctagttaagggattctaccctagcgatattgctgtggaatgggagtcaaacggacagccggaaaataactataagaccactcccccagtgctggattccgacgggtcgttctttctgtacagcaggcttactgtggataagtctcggtggcaggaagggaatgttttctcatgttctgtaatgcatgaggcgctacataaccactacacccaaaaatccctatccttgtcacttggg

SEQ ID NO: 15697 - DNA, 897 bp, synthetic construct
  misc_feature 1..897: note = source = /note="Description of Artificial Sequence: Synthetic coding sequence"
  source 1..897: mol_type = other DNA
atgaagtgggtgtctttcattagccttctctttctcttttcgtctgcatattccggatcattggataagagacatggggaaggaactttcacctcggatgtgagttcctaccttgaggaacaagcagcaaaggagtttattgcatggcttgtcaaaggtggaggaggaggcggtggttctggcggtggcggttcaggcgggggaggttcggcggaatccaaatacggcccgccctgcccaccatgccctgctccagaagccgccggaggtccttccgtgttcctctttcctccaaaacctaaggacaccctcatgatcagccggacccccgaagtgacctgtgtggtggtcgatgtctcccaagaagatcctgaggttcagtttaactggtacgtggatggagtggaagtccataacgccaagactaagccccgagaagagcaattcaattccacttaccgggtggtgtccgtccttactgtgttgcaccaagactggcttaacggaaaggagtataagtgtaaagttagtaataagggtctgccatcatcgatagaaaagaccatttcaaaagcgaaaggtcaacctagagagccgcaagtgtacacgctgcctccgagccaggaagagatgaccaagaaccaggtgtctctgacttgtctcgtaaaggggttttacccatccgatatcgcagtggaatgggaatcgaacggacagcccgagaacaactacaagaccacgcctccagtcctggactcggacggatcattctttctgtactcacgcctcactgtcgataagtcgcgttggcaggagggaaatgttttttcgtgtagcgtgatgcatgaagcacttcacaatcattacacccagaagtctctgtcgctgagtcttggc

SEQ ID NO: 15698 - DNA, 897 bp, synthetic construct
  misc_feature 1..897: note = source = /note="Description of Artificial Sequence: Synthetic coding sequence"
  source 1..897: mol_type = other DNA
atgaagtgggtgtcattcatttctctgctattcctgtttagtagtgcctatagtggttcattggacaagcgacatggagaaggcacttttacatctgatgtgtcttcctatctcgaagagcaggctgccaaggagttcattgcatggctcgtgaaggggggcgggggcggagggggttctggtggaggcgggtctgggggtggaggatctgcagaaagtaaatatggacccccttgtccaccctgccccgcgccagaggccgctgggggtccatccgtgtttctgttccctccaaagcctaaggatactctgatgatctcgcggacgcccgaggtgacctgcgtggttgtcgacgtctctcaggaggaccccgaggtacagttcaattggtatgtggacggagtggaggttcataacgcaaagaccaaacccagagaagagcagttcaattcgacttatcgcgtggtttcagtgctcactgtgttacaccaggattggctaaatggaaaagagtataagtgcaaagtctcgaacaaaggtctgcctagtagcatcgagaaaacaatatcgaaggccaaaggccagcccagagaaccacaggtgtataccctcccgcctagtcaggaagagatgacaaagaaccaggtgtccctgacttgtctggtaaaggggttttaccccagcgatattgccgtggaatgggaatccaacggtcagcccgagaacaattacaaaaccacacccccagtattggactcggacggtagttttttcctatattcccggcttacagtagacaagagccggtggcaggagggcaacgttttctcatgcagtgtcatgcatgaagctctgcataatcattatacccagaagtccctgtccctaagtctagga

SEQ ID NO: 15699 - DNA, 897 bp, synthetic construct
  misc_feature 1..897: note = source = /note="Description of Artificial Sequence: Synthetic coding sequence"
  source 1..897: mol_type = other DNA
atgaagtgggtgtcgttcatcagccttctttttctgtttagctcggcctactcaggatccctcgataaacgtcacggtgaagggacttttacttcggacgtgtcgagctatcttgaagagcaagcagcaaaagagtttatcgcatggctggtgaaaggaggtggcggtggtggcggttccggaggaggaggatcaggagggggaggatctgccgagtcgaagtacggaccaccatgtcccccctgccccgctcccgaggccgcaggcgggcctagcgtgtttctttttccccctaagcctaaagacaccctcatgatttccagaacccctgaagtaacttgcgtcgtggtggacgtctcccaagaggatccggaagtccaattcaactggtacgtggatggtgtggaagtccataatgcaaagactaagcctcgagaagagcagtttaacagcacttaccgggtagtcagcgtgctgaccgtgctgcatcaggattggctcaacggaaaggagtacaaatgtaaggtcagcaataaaggattgccaagcagcatagagaaaacgatttccaaggccaagggtcagccccgcgaaccccaggtgtacaccctcccaccatctcaagaggaaatgaccaagaatcaggtgtcactgacctgtctggttaagggattctacccctcggatattgcggtggaatgggagagcaatggacaacccgaaaacaactacaaaactacgcctccagtcttggattccgacggatccttctttctgtactccaggctgacggtggacaaatccaggtggcaagaaggaaacgtgttctcatgttctgtgatgcacgaggcactccataatcactacacccagaaaagcctttccctgtcactcggt

SEQ ID NO: 15700 - DNA, 897 bp, synthetic construct
  misc_feature 1..897: note = source = /note="Description of Artificial Sequence: Synthetic coding sequence"
  source 1..897: mol_type = other DNA
atgaagtgggtaagcttcatttctctgctgttcctgttctcgtctgcctacagtgggagtctggacaaacggcatggcgaaggcacatttacgtcagatgtttcatcatatctggaagagcaggccgcaaaggagttcatcgcctggctggttaaaggcggaggtggcggaggtggctctggaggagggggcagtggtggcggcggaagcgccgagtccaagtatggcccaccatgccccccatgtccagcacccgaggccgcaggcgggccctctgttttcctctttcccccaaaaccaaaagacacactaatgatctccaggaccccagaggtcacctgcgtagttgtcgacgtgtcacaagaagaccccgaagtgcagttcaactggtacgtggatggcgtagaagtgcacaacgctaaaactaaaccccgagaggagcaattcaatagtacctacagggttgtatccgtgttgacagtgctgcaccaagattggctgaacggaaaggagtataagtgtaaagttagcaacaaggggttgccatctagcattgagaaaacaattagcaaggccaagggccagccccgagagccccaggtatatacacttcccccttctcaggaggaaatgaccaaaaatcaggtttcattaacgtgcctggtaaaggggttctacccgagcgacattgccgtagagtgggagagcaacggacaacccgaaaataactataaaacaacgcctcctgtcttagattcagacggatccttttttttgtactctaggctgaccgtcgacaagagtaggtggcaggagggaaatgtgttcagttgttccgttatgcacgaggcactacataaccactacacacagaaaagcttatctctgtccctcggc

SEQ ID NO: 15701 - DNA, 897 bp, synthetic construct
  misc_feature 1..897: note = source = /note="Description of Artificial Sequence: Synthetic coding sequence"
  source 1..897: mol_type = other DNA
atgaagtgggtctcctttatttctctgttgtttctgttcagtagtgcgtattccggatctctggacaaaagacatggtgagggcacctttacatcagatgtgagcagctacctcgaagagcaagccgctaaagagtttatcgcctggctcgtgaaaggggggggcggcggcggaggttccgggggaggcggctcgggagggggagggtcggccgagtcaaaatatggtcccccatgccccccatgcccggctcctgaagccgctggagggccctcagtgttcctttttcccccaaagccaaaggacacacttatgatcagtcgtacccctgaagtgacgtgcgttgtggtggacgtctcccaagaggatccagaggtacagtttaactggtacgtggacggggtggaagttcacaatgccaagactaaaccaagagaggaacagtttaacagcacgtaccgcgttgtgtccgtgctgacagtgctccaccaagattggctgaacggaaaagagtacaagtgtaaggtgagtaataaagggttgccttcttcaatcgagaagactatatccaaggccaagggccaaccaagggaaccacaagtttacacattgccccccagccaggaagagatgacaaagaatcaagtctccctgacctgccttgtaaagggattctatccatccgacattgccgtggagtgggagagcaatggtcagcccgagaataactataagactactcccccagtgttggatagtgatgggtctttcttcctgtacagtcgcctgaccgtggataagtcgagatggcaggaaggcaatgttttctcttgctctgttatgcacgaagcattgcacaatcattatacacagaagtcactgtccctgtccctgggc

SEQ ID NO: 15702 - DNA, 897 bp, synthetic construct
  misc_feature 1..897: note = source = /note="Description of Artificial Sequence: Synthetic coding sequence"
  source 1..897: mol_type = other DNA
atgaagtgggtgtccttcatcagcctgctgttcctgttctcatcggcttactcaggctcgctcgacaaacggcacggggaaggcacctttaccagtgacgtgtcgtcgtacctcgaagaacaagccgcaaaggagttcattgcctggcttgttaagggtggcggaggaggaggcggtagcggaggcggcggaagcggaggcggaggttcagcagaatcaaaatacggaccgccatgccccccatgcccggctccagaggcagcgggaggaccctccgtgttcctgttcccaccgaagccgaaggacactctcatgatctcacggacgcctgaagtgacctgtgtggtcgtggacgtttcccaggaggatccggaagtgcagttcaattggtacgtggacggagtggaggttcacaatgccaagaccaaaccacgcgaagaacaattcaattccacttaccgggttgtgtccgtgctgaccgtgctgcaccaagattggttgaacgggaaggagtacaagtgcaaggtttcgaataaaggcctgccgtcgtcgatcgaaaagactatatccaaagcgaaagggcaaccgagggagccccaggtgtacacgttgcccccgtcgcaggaagagatgaccaagaaccaggtgtccctgacttgcctcgtcaaaggattctatccatctgatatcgcagtggagtgggagtccaacggtcagccggagaataactacaagaccactccaccggtgctggattccgacggatcctttttcctttactcaagactcactgtggacaagagccggtggcaggagggtaacgttttttcgtgctcagtgatgcatgaagccctgcataaccactacacccagaagtccctgtcactttctctggga

SEQ ID NO: 15703 - DNA, 897 bp, synthetic construct
  misc_feature 1..897: note = source = /note="Description of Artificial Sequence: Synthetic coding sequence"
  source 1..897: mol_type = other DNA
atgaagtgggtgagtttcatctccctgctttttctcttttcatccgcctacagtgggtctcttgataagagacatggcgagggaacttttacctcagacgtctcctcgtacttagaggagcaggccgccaaagaattcattgcttggctggttaagggcggcggcgggggcggggggagtggaggcggagggtctgggggagggggctccgctgaatcaaagtatggacctccgtgccctccttgtcctgcaccagaggccgccgggggtccttcagttttccttttcccacctaaaccaaaagacaccctcatgatctcgcgaaccccagaagtgacgtgtgtggttgtcgacgtatcccaggaagatcccgaagtgcagttcaactggtatgttgatggcgtggaagtgcacaatgcaaaaacaaaaccacgggaggagcaattcaactctacctatcgggtcgtctccgtgctcaccgtgcttcaccaggactggctcaatggaaaggaatacaagtgcaaggtgtcgaacaagggcctgccgagtagcatagagaaaacaatatcgaaggctaagggccaaccaagggaaccccaggtctatacactgcctccttcccaggaggagatgacaaaaaaccaggtaagcttgacatgcctagtgaagggcttttacccatcagacatcgcggtagaatgggaatcgaatgggcagccagagaataattataaaaccactcctccagtgctggactccgacggatccttctttctatattccaggcttactgttgacaagagccgatggcaagagggcaatgtattctcgtgcagtgtaatgcatgaggccctccataatcactacacacagaaaagtttatccctgtctctcggg

SEQ ID NO: 15704 - DNA, 897 bp, synthetic construct
  misc_feature 1..897: note = source = /note="Description of Artificial Sequence: Synthetic coding sequence"
  source 1..897: mol_type = other DNA
atgaagtgggtatcgttcatctctctcctcttcctcttctcgagcgcatactccggatcgctggacaagcggcatggagaagggacctttacttcggatgtgtcgtcatatctggaagaacaggctgcaaaggagtttatcgcctggcttgttaagggagggggtggtgggggtggcagcgggggcggcggatccggtggcggaggttccgcagagtccaagtacggacctccatgtccaccgtgtccagcaccagaggcagcgggaggtccatccgtgtttcttttccctcctaagcccaaggatactcttatgatctcccgaactcctgaagtcacctgtgtggtcgtggatgtctcacaggaagatcccgaggtgcaattcaactggtacgtggatggagtggaagtgcataatgctaagactaagccacgcgaagaacagtttaactcgacttatcgggtcgtgtctgtgctgactgtgcttcaccaggactggctgaatggaaaggaatacaaatgtaaggtttcaaataagggcctgccttcgtcgattgaaaagactattagcaaggcaaagggacaaccacgcgagcctcaagtctacacgctccctccctcccaggaagaaatgacgaaaaatcaagtgtcgctgacttgtctcgtgaagggattttacccaagcgatattgcagtcgaatgggaatcaaacggacagccagaaaacaattacaagaccaccccacctgtgttggatagcgatggctcctttttcctctactcccgtctgaccgtggacaagtctcgatggcaggaagggaacgtcttttcgtgcagcgtcatgcacgaggcacttcataaccattacacccagaagtcgctgtcgctgtcccttggt

SEQ ID NO: 15705 - DNA, 897 bp, synthetic construct
  misc_feature 1..897: note = source = /note="Description of Artificial Sequence: Synthetic coding sequence"
  source 1..897: mol_type = other DNA
atgaagtgggtgtcatttatttctctgctctttctattttcttcggcctactccgggagcctggacaagcgtcatggggagggtacgtttacctccgacgtgtcatcctatctcgaggagcaggctgctaaagagtttatagcatggttagtaaaggggggtggcggtggggggggttctggaggaggaggcagcgggggtgggggctctgccgaaagtaagtatggccccccctgccccccttgcccagccccggaggccgccggcggtccatcagtatttttgttcccccctaagccaaaggacactctgatgatctcccgtacccccgaggtcacatgtgtggtcgtagatgtgtcgcaggaggatccggaggtgcagttcaattggtatgtcgacggcgtggaagtacataacgcgaagacgaagcctagggaagagcagtttaactctacatacagggtcgtgagcgtgttgactgtcctgcatcaagattggcttaacggcaaggaatacaagtgtaaggtatcaaataagggcctgccttctagcatagagaaaacgataagtaaagcaaagggtcaaccgagggagccccaggtgtatacactgccgccaagtcaagaagaaatgaccaagaatcaagtttcactgacctgtctggtgaagggcttttacccctccgacatcgcagtggaatgggaatccaacggtcagcctgaaaacaactataaaactacccccccagttttggacagcgacggatccttctttctctatagccgactaaccgtggataagtcccggtggcaggaaggcaacgtattttcatgctcagtgatgcatgaagcactgcacaatcactacactcagaagtcgctgagcttatctttggga

SEQ ID NO: 15706 - DNA, 897 bp, synthetic construct
  misc_feature 1..897: note = source = /note="Description of Artificial Sequence: Synthetic coding sequence"
  source 1..897: mol_type = other DNA
atgaaatgggtctcctttatttcactactgtttctgttctcttctgcatactcaggctccctggacaagcgccatggagaaggtacttttacctccgatgtctcttcatacttagaggagcaggccgcgaaagagtttatcgcgtggctagtcaagggaggtggtggggggggcggttcgggagggggcggatcagggggtggtggttcagccgagtccaaatatggaccaccatgcccaccttgtccagcgcccgaggccgcaggtggaccttccgtgttcctgtttccacccaagccaaaggatactttaatgatcagcagaactcctgaagttacatgcgtggtagtggatgtttcccaggaagacccagaagtgcaattcaattggtacgtcgacggcgtggaggtccataatgctaaaactaaaccacgagaggagcagtttaactctacctaccgtgtggttagtgtgctcacagttctgcaccaggactggttgaatggcaaggagtataaatgcaaggttagcaataagggactgccttcgagtatcgagaaaactataagcaaagctaaagggcagccacgggaaccacaggtgtataccctgcctccatctcaggaggagatgactaagaatcaggtcagcctcacctgtctggttaagggattctacccatccgacattgcagtcgagtgggaatctaatggacaacctgagaataattacaagacaacgccgcctgttctcgattcagacgggtctttcttcttgtactcaagattgactgttgataagagtaggtggcaggaggggaatgtcttcagttgctcagtcatgcatgaagcactgcacaaccactacacacagaaaagcctttccctttctttgggg

SEQ ID NO: 15707 - DNA, 897 bp, synthetic construct
  misc_feature 1..897: note = source = /note="Description of Artificial Sequence: Synthetic coding sequence"
  source 1..897: mol_type = other DNA
atgaaatgggtgagcttcatatcgctcctgtttctgtttagctcggcatactcagggtcacttgacaaacggcatggagagggtacttttacttcggatgtctcatcgtaccttgaagaacaagcagccaaagagtttattgcatggctggtgaaaggtggaggcggaggaggcggaagcggaggtggcggcagcggtggcggagggtcagcggaatccaagtacggaccaccatgtcctccatgtcctgcgccggaagcagcgggtggaccatccgtgtttctttttcctccaaagccgaaagatacccttatgattagcagaaccccggaagtgacttgtgtcgtcgtcgatgtgtcacaagaggacccagaagtacaattcaactggtacgtggacggagtagaggtccacaacgccaaaactaagcccagagaagaacagttcaattcgacctaccgggtggtgtccgtgctcaccgtgctccatcaagattggcttaatggaaaggagtacaagtgcaaggtttcgaataaggggctgccctccagcatcgaaaagaccatctccaaggcaaagggccagccccgtgaaccacaagtgtataccttgcctccttcgcaggaagagatgactaagaaccaagtgtcgttgacgtgtttggtgaagggattctacccttccgacattgccgtcgaatgggaaagcaacggtcagcctgaaaacaactacaaaaccactcctccggtgctggattctgatgggtcgtttttcctttactcgcgcctcaccgtcgataagtctcgttggcaagagggtaacgtgttcagttgcagcgtaatgcacgaggcattgcataatcattacacgcagaagagcctctcactctcactgggc

SEQ ID NO: 15708 - DNA, 897 bp, synthetic construct
  misc_feature 1..897: note = source = /note="Description of Artificial Sequence: Synthetic coding sequence"
  source 1..897: mol_type = other DNA
atgaagtgggtgtctttcatatccctcctgttcttgttctcctcagcttactctggttcccttgacaagcgtcatggcgagggcacctttactagcgacgtttcatcatacttggaagaacaagcagctaaggagtttatagcatggctggtgaaaggtggaggcggcggaggtggaagcggtggaggcggatcaggcggtggaggttcagctgagtctaagtatggcccaccttgccccccctgccccgcacccgaggccgccggaggccctagcgtgttcctctttccaccaaagccaaaagatacactcatgatatcacgcactcccgaggttacctgtgtggtagtagacgtatcccaagaggaccccgaagtacagtttaactggtatgtcgatggcgtagaggtgcacaacgcaaaaaccaagccaagggaagaacagtttaattccacttaccgcgtcgtgtctgtgcttaccgtcctgcatcaggactggctgaacggtaaggaatataagtgcaaagtaagcaacaaaggactgcctagctcaatagagaagaccattagtaaggcaaaaggtcagcctagggaaccacaagtctacaccttgcctcccagccaagaggagatgaccaagaatcaagtaagcctcacctgtttggtcaagggattttacccttctgacatagccgtggaatgggagagtaatggacagccagagaataactacaagactacccctcccgtgctggacagcgacggctcatttttcctttacagtcgcctcactgtggacaagagcaggtggcaagagggcaacgtgttctcttgcagcgtgatgcacgaggctctccacaaccactatacacaaaagagtctgagtctcagcctggga

SEQ ID NO: 15709 - DNA, 897 bp, synthetic construct
  misc_feature 1..897: note = source = /note="Description of Artificial Sequence: Synthetic coding sequence"
  source 1..897: mol_type = other DNA
atgaaatgggtgtcatttatctccctgctgtttctgtttagcagtgcatatagtggctccctggataagcgacacggtgagggcacttttacaagcgacgtgtccagttacctcgaggagcaggctgcgaaagagttcatcgcctggcttgtcaaaggaggaggtgggggaggggggagtggaggggggggatctggcggcggaggttccgctgagtctaagtacggccctccttgccctccatgccccgccccagaagccgcggggggaccttctgtgtttctttttccgccaaagccaaaagacaccctcatgataagccgcacacctgaggtcacctgcgtcgtggtggacgtgtcacaggaagatcctgaggttcaatttaattggtatgtcgacggggtggaggtacacaacgcaaagaccaaaccccgagaagagcagttcaattccacctatagggtggtttccgtcttaacagtgctgcaccaggactggcttaacgggaaggagtataaatgcaaggtgagcaataaaggcctgccatcctccattgaaaaaacgatcagcaaagccaaaggtcagccccgcgaaccccaggtgtacaccctgccaccatcccaggaagaaatgacgaaaaaccaggtgtccctaacatgtttagttaaagggttttatcccagcgacattgcagtggagtgggaatcaaacgggcagccggaaaataattataaaacaacacctccggtactggattccgacgggagtttcttcctatattctcggctgaccgtggataagagccggtggcaggaggggaacgtcttttcgtgctcagtgatgcatgaggccctgcacaatcattatacccagaaaagtctctctctttcactgggc

SEQ ID NO: 15710 - DNA, 897 bp, synthetic construct
  misc_feature 1..897: note = source = /note="Description of Artificial Sequence: Synthetic coding sequence"
  source 1..897: mol_type = other DNA
atgaagtgggtcagttttatctcgctcctgttcctgttcagctcggcctactcgggtagccttgataaacggcatggagaagggaccttcaccagcgacgtctccagctacttggaagaacaggcggcgaaggagttcatcgcatggctggttaaaggaggaggcggcgggggtggatccggaggaggtggttcaggaggtgggggctccgccgaatcgaagtacggaccgccatgcccaccctgtccggccccggaagcggcgggaggtccatcggtgttcctgttcccccctaagccgaaggatacgcttatgatctcgagaacccctgaagtgacctgcgtggtggtcgatgtgtcgcaagaggaccccgaggtacagttcaattggtacgtggatggcgtggaagtccacaatgccaagaccaaaccccgggaagaacagttcaattcaacttaccgcgtggtgagcgtcctcaccgtgcttcatcaggactggctgaacggaaaagagtacaaatgcaaggtgtccaacaagggactcccttcaagcatcgaaaagactatctcgaaggctaaaggacaaccaagagaacctcaggtctacaccctgccgccatcccaggaggagatgactaagaaccaagtctcgctcacctgtctcgtgaaggggttctacccgtcagacatcgcggtcgagtgggagagcaacgggcagcccgaaaacaattacaagaccactcccccggtcctcgattctgacggatccttcttcctgtactcacggctcaccgtggacaagtcgcgctggcaggagggaaacgtgttctcatgcagcgtcatgcatgaagccctgcataatcattacactcagaagtccctgagcctgtcccttgga

SEQ ID NO: 15711 - DNA, 897 bp, synthetic construct
  misc_feature 1..897: note = source = /note="Description of Artificial Sequence: Synthetic coding sequence"
  source 1..897: mol_type = other DNA
atgaagtgggtatcgtttatctccctcctgtttctcttttcgagcgcatactcaggatcacttgataaaagacacggagagggaaccttcacctcagacgtgagctcttacctggaggagcaggcggccaaggaattcattgcatggctggtaaaaggaggagggggtggaggaggtagcgggggtggcggctccggaggaggcggatccgctgaatctaaatacgggccgccgtgcccaccttgtccagcacccgaagcagcggggggacccagtgtttttctctttccacccaagcccaaggatactctgatgatatcaaggacccctgaagtgacgtgtgtggtcgtcgacgtgtcacaggaggatcctgaggtgcagttcaattggtacgtggacggcgtggaggtgcataacgccaagacgaagcctagagaggaacagttcaattccacttatcgagtggtgtcagtgctgactgtcctgcatcaggattggcttaacggtaaggaatacaagtgcaaagtgagcaacaaggggcttccctccagcattgaaaagaccatctccaaggccaagggccaacctcgggagccacaagtgtatacgttgccaccgtcgcaagaagaaatgaccaaaaaccaggtgtctctcacttgtcttgtcaaaggtttctacccttcggatattgccgtagagtgggaatcaaacggacaacctgagaacaattacaaaaccacccctccggtgcttgattccgacgggtccttcttcctctactcgcggttgactgtcgataaatcgcggtggcaagaaggaaacgtgttttcctgttcggtgatgcatgaagctctgcacaatcattacactcaaaagtcactgtcccttagcctgggt

SEQ ID NO: 15712 - DNA, 897 bp, synthetic construct
  misc_feature 1..897: note = source = /note="Description of Artificial Sequence: Synthetic coding sequence"
  source 1..897: mol_type = other DNA
atgaaatgggtgtcgttcatctccctcctgttcctgtttagttccgcgtactcaggatcgctggacaaaagacacggcgaaggcaccttcacttccgatgtgagctcctacctcgaggaacaggccgcgaaggagtttattgcatggctggtgaagggtgggggtgggggaggtggcagcgggggcggcggttcaggaggaggaggatcagcagagtccaagtacggcccaccgtgcccgccttgcccagcacccgaagccgcggggggtccatccgttttcctgtttccgcctaagcccaaggatactttgatgatctcaagaaccccggaagtgacctgtgtggtcgtggatgtgagccaggaagatcccgaggtccaattcaactggtatgtcgacggagtggaagtccataacgcgaaaactaagccgagggaagagcagttcaactcaacctatcgcgttgtctcggtcttgacggtgctgcatcaagattggctgaacggcaaggaatacaaatgcaaggtgtccaataaggggctgccctcgtcaattgaaaagaccatcagcaaagccaaaggccagccgcgtgaaccgcaagtgtacacgcttccgcctagccaggaggaaatgacgaaaaaccaggtttctctgacctgcctggtgaaaggtttctacccatccgacatcgccgtcgagtgggagtcaaacggacaaccggaaaacaattacaaaactactcccccggtgcttgatagcgacggctcgttctttctgtactcgcgactgacggtggacaagtcgcgctggcaagaaggtaacgtgttctcatgttcggtgatgcacgaagccctgcacaatcactacacccagaagtcgctgtcactgtcgcttggg

SEQ ID NO: 15713 - DNA, 897 bp, synthetic construct
  misc_feature 1..897: note = source = /note="Description of Artificial Sequence: Synthetic coding sequence"
  source 1..897: mol_type = other DNA
atgaagtgggtatccttcatttccctgttgtttcttttttcatctgcgtactccggaagcctggacaagcggcatggtgagggaaccttcacgtccgatgtgtcctcttatctggaagagcaggctgctaaggagtttatcgcgtggctagtcaagggtggtggcggcgggggaggttccgggggcgggggaagcggcggcggcggtagtgctgaaagtaagtacggtcccccttgccccccatgtcccgccccagaggcggccggaggtcctagcgtcttcctcttccctccgaaacctaaggatactctgatgatatcccgtacgcccgaagtaacctgcgtagttgtagatgtgagtcaggaagatcctgaggtccagtttaattggtatgttgacggcgtcgaggttcacaatgccaagactaagccacgagaagaacaattcaacagtacctaccgggtcgtttcggtcttgacggtgcttcaccaggattggctaaacggaaaggaatacaaatgcaaggtctctaacaagggactgcccagttcaatcgaaaagaccatctccaaagctaagggacagccccgcgaaccgcaggtctacacgctgccgccctcacaggaagaaatgaccaagaatcaggtgtcactcacgtgcttggtcaagggtttctatccatccgatatcgcggttgaatgggaatcaaatgggcagccagagaacaactacaaaaccactccacccgttctagatagtgatggatctttctttttgtattcgcgcttaaccgtcgataagagccgatggcaggaaggtaacgtcttttcctgctctgtgatgcatgaagcgctgcataaccattatacccaaaagagcttgagcctttcacttggg

SEQ ID NO: 15714 - DNA, 897 bp, synthetic construct
  misc_feature 1..897: note = source = /note="Description of Artificial Sequence: Synthetic coding sequence"
  source 1..897: mol_type = other DNA
atgaagtgggtgtccttcatttcactgctgttcctgtttagctccgcctactcgggttcactggacaagagacatggggaggggacgtttacgtcggatgtgtccagctacctcgaagaacaggccgcgaaagagtttattgcttggctggtgaagggaggaggcggaggtgggggaagcggtggcggtggctcaggaggaggtggttcggccgaatcgaaatacggacccccttgccctccctgtccagcgccagaagcagccggaggaccatcggtgtttctgtttcctcctaagcctaaagatacccttatgatctcgcggaccccagaagtcacctgtgtggtggtcgatgtctcgcaggaagatcccgaggtccagttcaattggtacgtggacggtgtggaggttcataatgcaaagactaagcctagggaagaacagtttaacagcacctacagagtcgtgtcagtcctgaccgtgctccatcaggactggctcaacggtaaggaatacaagtgcaaggtgtcgaacaagggcctgccaagctccatcgaaaaaactatttccaaagccaaaggtcaacctcgagaaccccaagtctacaccttgccacctagccaggaggagatgactaagaatcaagtctcccttacgtgtcttgtcaagggtttctacccttcagatatcgccgtggaatgggagtcaaatggccaacctgaaaacaattacaagactactccgcctgttctcgattccgacggaagtttcttcctttattccagacttaccgtggacaaaagcaggtggcaagaaggtaacgtttttagctgctcggtgatgcatgaggcacttcataatcactacacccaaaagtcactttcactgtccctggga

SEQ ID NO: 15715 - DNA, 897 bp, synthetic construct
  misc_feature 1..897: note = source = /note="Description of Artificial Sequence: Synthetic coding sequence"
  source 1..897: mol_type = other DNA
atgaaatgggttagttttattagcctgctcttcttgttcagctctgcatacagtggcagcctggacaaaagacacggagaaggcaccttcacctcggacgttagcagctacttagaggaacaggctgcgaaggaattcatcgcctggctggtaaagggaggaggaggcggaggagggtctggcgggggaggctcggggggaggcggatctgcagaatcaaaatatggaccaccttgtccaccttgtccagcacctgaggctgcaggaggacctagtgtatttctgttcccccctaagccaaaggatacactgatgatatctcggacaccagaggtgacgtgcgtggtggtggatgtcagccaggaggatcccgaggttcagtttaattggtacgttgacggagttgaggttcataacgccaagacaaagcctagagaggaacagtttaacagtacatatcgtgtggtgtctgtgttgaccgtcctgcatcaagattggctcaacgggaaggaatacaagtgtaaggtgagtaacaaaggcctgccttcatctattgagaagacaatcagtaaggcaaagggacagcctagggagccccaagtgtacaccttaccaccttctcaggaggagatgaccaagaaccaagtctctctgacatgcctggtgaaaggcttctatccctcagatatcgcagtggaatgggagtccaacggccaacccgagaacaactacaaaaccactccccctgtgttggacagcgatggatctttttttctgtacagtaggctgacggtcgacaaaagcagatggcaggagggaaatgttttttcttgtagcgttatgcacgaggccctccacaaccattacacccaaaagtctctgtccctatctttgggc

SEQ ID NO: 15716 - DNA, 897 bp, synthetic construct
  misc_feature 1..897: note = source = /note="Description of Artificial Sequence: Synthetic coding sequence"
  source 1..897: mol_type = other DNA
atgaagtgggtcagtttcatttccctgctctttctctttagcagcgcctatagcggaagtcttgataaacgccatggcgagggaacctttacttccgacgtctccagttacttagaagagcaagccgccaaagagttcatcgcctggctggtcaaaggaggggggggtggcggcggtagcggcggggggggaagtggaggcggaggaagcgctgaaagtaaatacggtcccccctgccctccctgtcccgcaccagaagcagccggtggaccctcagtctttttgttccctccgaagcctaaagataccctgatgatctctcggacccccgaagttacctgtgtagttgtcgatgtgagccaagaagaccccgaggtccagttcaattggtatgtagacggcgtagaggtgcacaacgccaagaccaaacctagagaggagcagtttaactccacatacagggtggttagtgttctaaccgtcctgcaccaggattggctgaatgggaaggaatacaagtgcaaagtgtctaataagggcctgcctagctctattgagaaaaccatctccaaggcaaaagggcagcccagggaaccgcaagtgtatacactgccgccctctcaggaagagatgactaagaatcaggttagcctgacgtgcctggtcaaaggcttttacccctcagacatcgcagtggagtgggagtctaatggtcagcccgaaaataactataaaacgacaccacctgtgctggacagcgatgggagcttttttctctacagccggttgaccgtggataagtcccgctggcaggagggcaacgtgttttcttgctcagttatgcacgaagccctacacaaccactacacccagaaatcactgtccttgtcactcgga

SEQ ID NO: 15717 - DNA, 897 bp, synthetic construct; identical to SEQ ID NO: 15683
  misc_feature 1..897: note = source = /note="Description of Artificial Sequence: Synthetic coding sequence"
  source 1..897: mol_type = other DNA

SEQ ID NO: 15718 - DNA, 897 bp, synthetic construct
  misc_feature 1..897: note = source = /note="Description of Artificial Sequence: Synthetic coding sequence"
  source 1..897: mol_type = other DNA
atgaagtgggtttccttcattagcctgctgtttcttttcagcagtgcatactccggatctctggataagagacacggggaagggaccttcaccagcgacgtaagcagttatctcgaggagcaggcagccaaagagtttatcgcgtggttggtaaagggcggcgggggcggggggggatccggcggcggcggtagtggaggaggtggctcagctgaaagcaaatacggaccaccgtgccctccttgcccggcgccagaagcggctgggggacccagtgtatttcttttcccccccaaaccgaaggacaccctcatgatctcacgcacccccgaagttacatgcgtcgttgtagacgtttctcaggaggacccagaggtgcagttcaattggtacgtcgacggggtcgaggtccataacgccaaaacgaagccccgggaggagcagtttaatagtacttatcgggtcgtgtccgttctgacagtgctccatcaggattggctgaatggcaaggagtacaagtgtaaggtgagtaataagggcttgcccagtagcatcgaaaaaacgatcagtaaggcgaaaggtcagcccagggaaccccaggtttacacattgccaccatctcaggaggagatgaccaagaaccaggtgagcttgacctgtctcgtgaaagggttttacccaagtgatattgccgttgagtgggagagcaacgggcagcctgaaaataactataagaccaccccaccagttctggactcagatggttcattttttctctactcaaggctgacagtcgacaaatctaggtggcaggagggtaacgtattctcctgcagcgtaatgcatgaggcactgcataaccactacacccagaaatcactctccctgtcactggga

SEQ ID NO: 15719 - DNA, 897 bp, synthetic construct
  misc_feature 1..897: note = source = /note="Description of Artificial Sequence: Synthetic coding sequence"
  source 1..897: mol_type = other DNA
atgaaatgggtctccttcataagcctactctttttgttctcctctgcatactctggaagcctagataaacggcatggggagggtacattcacctccgacgtgtcttcctacctcgaggaacaggccgccaaggaatttatagcgtggctcgtgaaggggggaggcggtggcgggggaagcgggggaggggggtcgggtgggggagggtccgcagagtccaaatatggccctccctgtccgccttgtcccgcacccgaagctgccgggggccccagtgtttttttgtttccacccaaacccaaagacactttaatgatttctcgcacaccagaagtgacttgtgtggttgtggacgtgtctcaggaggacccagaggtccagttcaattggtatgtcgacggcgttgaagtgcataatgctaagaccaagccacgcgaggagcagtttaactcaacctatcgggtcgtgtccgtcttgaccgtgcttcatcaggactggttgaatgggaaggagtacaaatgcaaggtttcgaacaagggtctgccctccagcatagagaaaactatatcgaaagccaaggggcaaccacgcgaaccccaggtctacacccttcctcctagtcaagaggaaatgaccaaaaaccaggtgagtctcacttgtctcgtcaagggtttctacccgtccgatatcgctgtagaatgggagtccaacggacagccggaaaacaactataaaacaaccccacctgtcctggattcagatgggtctttttttctgtactcgcgtttgactgtagataaatccagatggcaagaaggtaacgtgttcagttgcagcgtgatgcatgaggctctgcataaccactatactcaaaaaagtctgagcctgagcctgggc

SEQ ID NO: 15720 - DNA, 897 bp, synthetic construct
  misc_feature 1..897: note = source = /note="Description of Artificial Sequence: Synthetic coding sequence"
  source 1..897: mol_type = other DNA
atgaaatgggtgagcttcatctcactgctgttcctcttctccagcgcttactcaggctcacttgacaagaggcatggcgaaggcacctttacctctgacgtgtcctcgtacctcgaagaacaggcagccaaggaattcatcgcatggctggtgaaaggtggaggtggaggaggaggatcaggcggcggaggaagcggcggaggaggaagcgccgaaagcaagtacggaccgccgtgtcctccatgtcctgcgccggaggcagccggaggaccaagcgtctttttgttcccgcctaagcctaaggacactctgatgatttcccggaccccagaagtgacctgcgtcgtggtggatgtcagccaggaagatcccgaagtgcagttcaactggtatgtcgacggcgtcgaagtgcacaacgctaagactaaacccagagaggagcaattcaactcgacctaccgcgtggtgagcgtgctcaccgtgctgcaccaggactggctgaacggcaaggaatacaagtgcaaagtgtccaacaagggactgccaagcagcatcgagaaaaccatctccaaggccaagggtcagcctcgggagccgcaggtctacacgctccctccgtcgcaagaagaaatgaccaagaaccaagtgtccctgacttgcctcgtgaagggtttctatcctagcgatatcgccgtggagtgggaaagcaatggacaaccggaaaacaactacaagaccactcccccagtcctggatagcgatggatccttctttctgtactcccggctgactgttgacaaatcgcgctggcaggaaggcaacgttttctcgtgctcggtgatgcacgaagccctgcataaccattacacccagaaatcgttgtccctctcactggga

SEQ ID NO: 15721 - DNA, 897 bp, synthetic construct
  misc_feature 1..897: note = source = /note="Description of Artificial Sequence: Synthetic coding sequence"
  source 1..897: mol_type = other DNA
atgaaatgggtcagcttcatctcccttctgttcctgtttagcagcgcatactccggatccctggataagcgccacggagaaggtactttcacgtccgacgtgtcctcttacctcgaggaacaagccgcgaaggagttcatcgcatggctcgtgaagggcggtggcgggggagggggatcgggaggtggaggaagcggaggcggcggctccgccgagtcgaaatacggacctccatgccctccgtgtccggccccagaggccgctggaggaccatccgtgttcctgtttccgccgaagcccaaggacaccctcatgatctcccggactccggaagtcacttgtgtggtcgtcgatgtgagccaggaggacccggaagtccagttcaactggtatgtcgacggcgtggaagtgcataacgctaagactaaaccgcgagaagaacaattcaatagcacctaccgggtggtgtcagtgctcactgttctgcaccaggattggctcaatggaaaagaatacaagtgcaaagtttccaacaaaggcctcccgtcgtccattgaaaagaccatctcaaaggcgaagggtcagccccgtgagccacaagtctacacgctgcccccatcgcaagaggagatgactaagaatcaggtgtcgctcacttgcctcgtgaaagggttctatccgagcgatatcgccgtggagtgggaatctaacggacaaccagaaaacaactacaagaccactccgccagtccttgactcagacggatcctttttcctctactcaaggctgacggtcgataagtcacgctggcaggaaggaaacgtgtttagctgctcggtgatgcacgaagcgctgcataatcactacacccaaaagtccctgtccctgtctctcggg

SEQ ID NO: 15722 - DNA, 897 bp, synthetic construct
  misc_feature 1..897: note = source = /note="Description of Artificial Sequence: Synthetic coding sequence"
  source 1..897: mol_type = other DNA
atgaagtgggtgtctttcattagtctactatttctcttttcttctgcttactcaggttctctggacaaacgccacggcgaggggacctttactagtgacgtctcttcctatctggaggagcaggcagctaaggaatttattgcttggcttgtgaagggtggaggaggaggcggtggatctggaggtgggggatccgggggggggggtagcgctgagagcaagtacggtcccccgtgccctccatgcccagcaccagaagctgctggagggccctcagtctttctctttccgcctaagccaaaagatacactgatgataagccgcaccccggaggtaacgtgcgtggtggtggatgtgtcccaggaggacccagaagtccagttcaattggtacgttgatggggtagaagtccataacgcgaagacaaagcccagagaggagcagttcaatagcacatatcgagtcgtttccgtgttgaccgttctgcaccaggactggctgaacggcaaggagtataaatgtaaagttagtaataaaggcctcccttcgagtatcgaaaagaccatctccaaggccaaaggacagccccgagagccacaggtatacaccctaccccctagccaggaggaaatgactaagaaccaggtttctctgacctgccttgtgaaaggcttttacccttccgacatcgctgtcgagtgggaatccaatggtcagccagagaacaactataagactacaccaccagtgctcgactccgatgggtctttctttctgtattcacgcttgacggttgataaatctagatggcaggaaggcaacgttttctcctgctcagtcatgcacgaggcactccacaaccactatacacaaaaaagtctatcactcagtctcggt

SEQ ID NO: 15723 - DNA, 897 bp, synthetic construct
  misc_feature 1..897: note = source = /note="Description of Artificial Sequence: Synthetic coding sequence"
  source 1..897: mol_type = other DNA
atgaagtgggtgtccttcattagcttgctgtttctgttctcatccgcctactcgggaagcctggacaaaaggcatggcgagggaactttcacctcggatgtctcgtcctacctggaggaacaagccgcgaaagaattcatcgcttggctcgtgaagggcggtggcggaggcggaggttcaggtggtggaggatcgggaggaggaggatccgcggagtccaagtacggcccgccgtgcccgccttgcccggccccagaagcagcagggggaccttccgttttcctgttccctcccaaacccaaggacaccctcatgatctcgaggaccccggaagtgacttgcgtggtcgtcgatgtttcgcaagaggatccggaagtgcagttcaactggtacgttgatggagtggaggtgcacaacgcaaaaactaagccgagagaagagcagttcaatagcacctaccgcgttgttagcgtgctgactgtcctccaccaagattggctgaacggcaaggaatacaagtgtaaggtcagcaacaaggggctcccatcgtcaatcgagaaaactatctcgaaggcgaaggggcagccacgcgagccgcaggtgtacacgctgccaccttctcaggaagagatgactaagaaccaagtgtccctcacctgtctcgtcaaaggcttttatccgtctgacattgcggtggagtgggagtccaacgggcagcctgagaataactataagactactccaccagtgctcgactcggacggatcgttctttttgtactcccgcctcactgtggacaagagccggtggcaggaaggcaacgttttctcctgctccgttatgcacgaggccctgcacaaccattacacccagaaatcgctgtccctttcactgggc

SEQ ID NO: 15724 - DNA, 897 bp, synthetic construct
  misc_feature 1..897: note = source = /note="Description of Artificial Sequence: Synthetic coding sequence"
  source 1..897: mol_type = other DNA
atgaagtgggtttcgttcattagcctgctttttcttttttcatcagcgtactcgggatcccttgataaacgccacggcgaaggcacctttactagcgatgtgtcgagctaccttgaagaacaagccgcaaaggagtttattgcgtggcttgtcaaggggggcggcggaggaggaggtagcggtggtggagggagcgggggaggtggatcagcggaatcgaagtacggaccaccttgtcccccttgtcccgcaccagaagcagcaggagggccttcggtttttctgtttccacctaaacctaaggacacccttatgatatcgcggaccccggaagtgacctgtgtggtcgtcgacgtctcacaagaggacccggaagtgcagttcaactggtacgtcgatggagtggaggtgcataatgccaagaccaagcctcgcgaggagcagttcaactcgacctaccgcgtggtgtccgtgctgaccgtgctgcatcaggactggctgaatggcaaggagtacaagtgtaaggtcagcaacaagggccttcctagctcgatcgaaaaaactatttcgaaggcgaaggggcaacctagggagccacaagtgtatactcttcctccttcacaggaggaaatgaccaaaaaccaggtaagccttacctgcctggtcaagggtttctacccttcagatattgcagtggagtgggaatcgaacgggcaacccgagaataactataagactactcccccggtcctggattccgatgggtcgttttttctgtattcgcggcttaccgtcgataagtcccgttggcaagaaggtaatgtgttttcatgctccgtgatgcatgaggcactgcacaatcattacacccagaagtcactgtccttgtccctcggt

SEQ ID NO: 15725 - DNA, 897 bp, synthetic construct
  misc_feature 1..897: note = source = /note="Description of Artificial Sequence: Synthetic coding sequence"
  source 1..897: mol_type = other DNA
atgaaatgggtgtcatttatctctctgctgttcctgttctcatcggcctactccggatcactcgacaagcggcacggagaaggcacttttacctcggacgtgtcctcgtacctcgaggagcaagctgccaaggagttcatcgcgtggctggtcaagggaggaggagggggcggaggatcgggaggtggtgggtcgggcggaggaggcagtgcggaatccaagtacgggcccccgtgtcccccgtgccctgcaccggaggccgcaggcggaccgtcggtgttcctgttcccacccaaacccaaggataccttgatgatttccaggaccccagaggtcacttgcgtggtggtggacgtgtcgcaggaggaccccgaagtgcaattcaactggtacgtggacggagtggaagttcacaacgccaagactaagcctcgagaggaacaattcaattccacttatcgagtggtgtccgtgctgactgtattgcaccaggattggctgaatggcaaggagtacaaatgcaaggtgtcaaacaaaggcctgccttcatccatcgaaaagacgatctcgaaagccaaaggacagccaagggaaccgcaggtgtacaccctgccaccgagccaagaggagatgaccaaaaatcaagtgagcctgacgtgcctcgtgaaaggtttttacccatcggacatcgcggtggaatgggaatccaatggccagcctgaaaacaactacaagacgactcccccggtgctggactcggacgggagctttttcctgtactcgcggctgaccgtcgataagtctcgctggcaggagggaaacgtgttctcctgtagcgtgatgcacgaagcgctgcataaccattacacccagaaaagcctgtcgttgtcgctggga

SEQ ID NO: 15726 - DNA, 897 bp, synthetic construct
  misc_feature 1..897: note = source = /note="Description of Artificial Sequence: Synthetic coding sequence"
  source 1..897: mol_type = other DNA
atgaaatgggtctcattcatctccctgctcttcctatttagttcagcatattctgggtcccttgataaacggcacggagagggaacattcacatctgatgtgagttcatatctcgaagagcaggccgctaaagaattcatagcatggttggtgaaaggaggaggaggagggggagggtccggaggaggggggagtggagggggggggtcagctgaatcaaaatacggacccccatgtcccccttgtccagctcctgaagctgctggagggccatcagtgtttctgttcccacctaaacctaaagacactttgatgatatccagaactcccgaagtcacatgcgtagtggtcgatgtctctcaggaagatccagaagtccagtttaattggtatgttgacggggtggaggttcataatgctaaaactaaacctagggaagaacagtttaactctacatatagagtggtgtctgtgctcacagtgttacatcaggattggctgaatggaaaagaatacaaatgcaaagtttcaaataaagggttaccctcgtctatagaaaaaactatcagtaaagccaagggacagccacgggaaccccaggtttatactcttcctccctctcaggaagaaatgactaaaaaccaggtgtcactgacttgtctggtaaaaggattctacccttctgatattgctgtggaatgggaatccaatgggcagccagaaaataactataagacaactccccctgtgctggatagtgatgggtctttctttttatactccaggcttactgtcgataaatccagatggcaggaaggaaatgtgttctcttgttctgtaatgcatgaggccctgcacaatcattatacacagaaatctctaagtctttcactcgga

SEQ ID NO: 15727 - DNA, 897 bp, synthetic construct
  misc_feature 1..897: note = source = /note="Description of Artificial Sequence: Synthetic coding sequence"
  source 1..897: mol_type = other DNA
atgaaatgggtgagtttcatttcgttgttgtttctcttctcctcggcgtatagcggctccttggacaagcgtcacggagagggtacctttacatcggatgtctcgtcctacctggaggagcaggccgccaaggagttcattgcctggcttgtcaagggagggggtggaggggggggaagcggaggaggtggtagtggcggtggcggatcggccgagagcaagtatggaccaccttgcccgccgtgtccagctcccgaagcagccggcggtccgtcggtgttcttatttccacccaagccgaaagacaccctcatgatctcgcgtacgcccgaagttacctgcgttgtcgtggacgtgtcccaggaggatccagaggttcagtttaactggtacgtggacggggtcgaggtgcacaacgcgaagaccaagcctcgggaggaacaattcaatagcacgtatcgagtggtttctgtcctgacagtgctgcaccaagattggctaaatggtaaggagtataaatgcaaggtttccaacaaaggcttgcccagctcgattgaaaagacgatttccaaggcgaagggtcagccgcgcgaaccacaagtatacacgctgccgccatcacaggaggagatgaccaagaatcaagtgtccttgacgtgtttagttaagggattttacccgagcgatatcgccgttgagtgggaatccaacggacaaccagaaaataattacaaaactacccccccggtgctagattcggacggctctttcttcttgtattcccgcctgacggtggacaaaagccgctggcaagagggtaacgtctttagctgctccgtcatgcatgaggctctgcacaatcactatacccagaaatccctatccctgtcattgggc

SEQ ID NO: 15728 - DNA, 897 bp, synthetic construct
  misc_feature 1..897: note = source = /note="Description of Artificial Sequence: Synthetic coding sequence"
  source 1..897: mol_type = other DNA
atgaagtgggtgagcttcataagcctcctgtttctcttttctagcgcatattcaggctcactcgataagcgacatggcgaaggaactttcacttcggatgtgtcctcctaccttgaagagcaggcagccaaggagttcattgcctggttggtgaagggaggaggaggaggcggtgggagcggaggagggggctcgggtggtggaggttcggcggaatccaaatacggacctccctgtcccccatgtcctgctcctgaagcagcaggtggtccatccgttttcttgtttcctcctaagccaaaggataccctgatgatctcgcgaactccagaggtgacgtgtgtggtggtcgacgtgtcgcaagaggaccccgaggtgcagtttaactggtacgtcgacggagtggaagtgcataatgccaaaactaagcctagagaggaacagttcaattccacttacagagtcgtttcggtgctgactgtgcttcaccaggactggctgaacggaaaggagtacaagtgtaaggtaagcaataagggccttccttcgtcgatcgaaaagaccattagcaaagcaaagggacagccgcgagagccccaggtctacacgctcccaccaagccaagaggaaatgacgaaaaatcaagtctcccttacctgtctggtgaaggggttttacccatccgatattgcagtggaatgggaatcaaatggccaacctgaaaacaactacaagaccaccccacctgtgctggattcagacggctcgttcttcctgtattctcggctgaccgtggataagtcccggtggcaggaaggaaacgtcttttcgtgcagcgtgatgcacgaggcactccacaatcactacactcaaaaaagccttagcctgtcgctggga

SEQ ID NO: 15729 - DNA, 897 bp, synthetic construct
  misc_feature 1..897: note = source = /note="Description of Artificial Sequence: Synthetic coding sequence"
  source 1..897: mol_type = other DNA
atgaaatgggtgtccttcattagtctcctctttcttttctcatccgcatactccggatccctcgataagcggcacggcgaaggtacctttacttccgacgtgtcctcatacctggaggaacaagcagccaaagaattcatagcctggctcgtgaagggaggagggggagggggcggatcgggaggaggtggtagcggaggcggcggttcagcagagagcaagtacgggcctccctgccctccgtgtcccgcaccagaagctgcaggtggtccttcagtgttccttttcccaccaaagccaaaagatactctcatgatttccagaacccctgaggttacttgtgtcgttgtcgatgtgagccaagaggacccagaagtgcaattcaactggtacgtcgacggagtggaagtgcataatgcaaagaccaaaccaagagaggaacagtttaactccacgtatcgggtcgtaagcgtgcttaccgtccttcaccaagactggcttaacggcaaagagtacaagtgtaaagtgtcgaacaagggccttccgtcctccatcgaaaaaactatctcgaaggcaaaaggacaacctcgcgaaccgcaagtgtataccctgcccccctcgcaagaagaaatgaccaaaaaccaggtttcccttacttgtcttgtcaagggattttaccccagcgatatcgccgtcgaatgggagtcaaatgggcagccagaaaacaattacaaaaccactccacctgtgttggattctgatggatcgttctttctctacagccggctcaccgttgacaagagtcgctggcaggagggaaatgtgttctcgtgctccgtgatgcacgaagccctgcataatcattacacccagaagtccctttcactgtcactggga

SEQ ID NO: 15730 - DNA, 897 bp, synthetic construct
  misc_feature 1..897: note = source = /note="Description of Artificial Sequence: Synthetic coding sequence"
  source 1..897: mol_type = other DNA
atgaagtgggtgtccttcatctcactgctcttccttttttcttccgcctactcagggtcactggacaagcgccatggcgagggcacattcaccagcgatgttagcagttatctcgaggagcaagccgcaaaggagtttattgcgtggctcgtgaaggggggaggaggtggtgggggcagcgggggtggagggtccgggggaggaggatctgccgagtccaagtacggacccccatgtccaccatgtcccgccccggaagcagctggtggcccaagcgtctttctgtttccacccaagcctaaagatactcttatgatatcaagaacacctgaagtcacatgtgtggtcgtggatgtgtctcaggaagatcctgaggttcagttcaactggtatgtggacggcgttgaggttcataacgcaaaaacaaagccacgggaggagcagttcaattctacttaccgcgtcgtaagtgtcctgaccgtgcttcatcaggactggctcaatggtaaagagtacaagtgcaaggtgtctaataagggccttccttctagcatcgagaagaccatctcaaaagccaagggacagccccgtgagcctcaggtctacactctgccacccagtcaggaagagatgactaaaaatcaggtcagcctgacctgccttgttaaagggttttatccctccgacatcgccgtagaatgggaatcaaatggtcagccagagaacaactacaagaccacaccaccagtcttggattccgatgggtccttctttttgtactccagactgacagtggacaaatccagatggcaggaaggcaacgtcttctcttgctctgtgatgcatgaggcgctgcacaaccactacacccagaagtccctttccttgagtcttggc

SEQ ID NO: 15731 - DNA, 897 bp, synthetic construct
  misc_feature 1..897: note = source = /note="Description of Artificial Sequence: Synthetic coding sequence"
  source 1..897: mol_type = other DNA
atgaaatgggtgagttttattagcttgctattcctgttttccagcgcctattcggggtccttggataaacggcatggggagggaacttttacaagtgacgtcagcagttacctcgaggagcaggctgccaaggagtttatcgcctggctagttaaaggcggaggaggagggggagggtcaggaggtggtggatctggcgggggaggatcggcggagagtaaatacggacccccctgtccaccttgcccagcacctgaggcggctgggggacccagcgtgtttctgttccctcccaagccaaaggacacgctcatgattagtcgcacacctgaagtgacttgcgtagtggtagacgttagtcaggaggaccccgaggtacaattcaactggtacgtggacggtgtcgaagtacacaacgcaaagaccaaacctagagaagaacagtttaatagtacgtatcgtgtcgtgagtgtgcttacagtcttgcaccaagattggttgaacggaaaagaatacaagtgcaaagtcagtaataagggtctgccgtctagtattgaaaagactatttccaaagcgaaggggcagccgcgcgaaccccaggtctacaccctgccaccctctcaagaagaaatgacaaaaaaccaggtttcgttgacgtgcctggtcaagggtttttatcctagtgatatagccgtagagtgggaatccaacggacaaccagaaaacaattacaaaactacgccccctgtcctggacagcgacgggagcttctttctgtattcccgactcaccgttgacaaaagtcgctggcaagaaggcaatgttttttcctgctcggtgatgcacgaagcactgcataaccactacactcagaaatccctcagtttaagcctcgga

SEQ ID NO: 15732 - DNA, 897 bp, synthetic construct
  misc_feature 1..897: note = source = /note="Description of Artificial Sequence: Synthetic coding sequence"
  source 1..897: mol_type = other DNA
atgaagtgggtgagctttatctctctgctgtttctgtttagctcagcctactctggctccctggataagagacacggggaaggaacatttacttcggatgtatcctcctatctcgaagagcaggccgccaaggagttcatcgcctggctcgtgaagggcggaggggggggagggggctcaggggggggcggtagtggcggaggaggcagcgccgaatctaaatacggcccaccgtgccccccctgccccgccccagaggccgccggcggtccctctgtgtttttgttcccccctaagcccaaagacactttgatgataagccggacccctgaggtaacttgtgtcgtagtcgatgtgtcccaggaggatccggaagttcaattcaactggtacgtcgacggagtggaagtacacaatgctaaaacaaaaccccgagaagaacagttcaacagtacctatcgcgtggtttccgtactgactgtgctccaccaggactggctcaacggcaaggaatacaaatgcaaggtcagtaataaagggctccctagttccattgagaagactatcagcaaagctaagggccaacctagagaaccgcaggtgtacactcttccacctagccaggaggagatgaccaaaaaccaggtgtcattaacatgtcttgtaaagggcttctatcctagcgacattgcagtagaatgggagagcaatggacagccagagaacaattataagaccacgcccccagtgttggacagtgacggatctttctttctatactcccggctcaccgttgataaatctcggtggcaggagggtaatgtgtttagctgcagcgtgatgcacgaagcgctgcataatcattatacccagaagtcactttcactgtccctcggc

SEQ ID NO: 15733 - DNA, 897 bp, synthetic construct
  misc_feature 1..897: note = source = /note="Description of Artificial Sequence: Synthetic coding sequence"
  source 1..897: mol_type = other DNA
atgaaatgggtctcgttcatctcgttgctctttcttttctcctcggcctactccggatctcttgacaagaggcatggcgagggtaccttcacgagtgatgtctcctcctaccttgaagagcaggcggctaaggagtttattgcctggctcgtcaagggcggcggcggcgggggtggctccggcgggggcggttctggcggcggcggcagcgctgagtccaagtacggcccgccctgtcccccctgtcccgccccggaggctgccggcggaccatccgtcttcttgttccctccaaagcccaaggatactcttatgatatcccgtacgccggaggtcacctgtgtcgtggtggacgtctcccaggaagatcctgaggtccagttcaactggtacgtagacggtgtcgaggtccataacgccaagacgaagccgcgcgaggagcagttcaactccacctaccgggtcgtcagcgttctcacagtcctccaccaggattggctgaatggcaaggagtacaaatgcaaggttagcaacaagggactcccatcgtcaattgagaagaccatctcgaaagcaaaaggacaaccgcgagaaccccaagtttacacgctgcctccttcccaggaggagatgaccaagaaccaagtatccctgacctgcctcgttaagggcttctacccttctgacatcgctgtcgagtgggagagcaacggtcagcctgagaacaattacaagacgaccccccctgtgcttgacagcgacggcagcttctttttgtactctcgtctcacagtcgacaaaagccgctggcaggagggaaatgtttttagctgctctgttatgcacgaagctctgcacaatcattacactcagaaaagcctctcgctcagtctgggc

SEQ ID NO: 15734 - DNA, 897 bp, synthetic construct
  misc_feature 1..897: note = source = /note="Description of Artificial Sequence: Synthetic coding sequence"
  source 1..897: mol_type = other DNA
atgaaatgggtatccttcataagtctacttttcctgttttcttctgcttactcaggttccctggataagcgccacggcgaggggaccttcacctcagatgtgtcttcgtacttagaggaacaagctgctaaagaatttatagcatggctggttaaaggtggcggtgggggtggagggagtggaggaggaggctcgggaggaggaggttctgctgaatcaaaatatggacccccatgcccaccgtgcccagcaccagaagctgcaggaggaccatctgttttcctttttccaccaaagccaaaagatacacttatgatttcacgaacacctgaggtgacgtgcgtcgtggtcgacgtttcgcaggaggacccagaggtgcaattcaactggtacgttgatggagtggaggtccataatgctaaaacaaaaccaagagaagaacagttcaattccacataccgtgttgtttcggttcttacggtccttcatcaagactggcttaacggcaaagaatacaagtgtaaggtttcaaataagggacttccatcatcaattgaaaagactatatcaaaagcgaaaggacagccacgagagccacaggtttatacgttgccaccgagtcaagaggagatgacgaaaaaccaagtttcgttgacatgcttagtaaagggtttctacccgtcggacatcgctgtggaatgggaatctaatgggcaacctgagaataattacaagactaccccgccggttttggatagcgatggatcattttttttgtactcgagactgactgtggataagtcacgttggcaggagggaaatgtcttctcatgttctgttatgcatgaggctcttcacaaccactatacgcagaaatctctctcccttagtctgggt

SEQ ID NO: 15735 - DNA, 897 bp, synthetic construct
  misc_feature 1..897: note = source = /note="Description of Artificial Sequence: Synthetic coding sequence"
  source 1..897: mol_type = other DNA
atgaagtgggtcagctttatctcactcctttttcttttttcctccgcctatagcggatcgttggacaaaagacatggtgaaggcacctttacctccgatgtgagctcgtacctggaagaacaagcagcaaaggagtttattgcttggcttgttaagggcggcgggggtgggggaggaagcggaggtggaggaagcgggggaggaggatcggcagagtctaagtatggccccccttgccctccttgccctgcacctgaagcagccggaggcccgtcagtctttttgtttccgccaaagccaaaagataccctgatgatttcgaggactcccgaagtgacctgcgtggtcgtggacgtgtcgcaagaagatccagaagtgcaattcaactggtacgttgatggcgtggaagtccacaacgccaagaccaagccccgcgaagaacagtttaactccacctacagagtggtgtcagtgctcactgtgctccatcaagactggcttaacggcaaggagtataagtgcaaggtgtcgaataaaggacttccatcctcaatcgaaaaaaccattagcaaggcaaagggacaaccacgggaaccccaggtgtataccctccctccctcccaggaagagatgaccaaaaatcaggtttcccttacttgtttggtgaaaggattctatccctccgacatcgccgtggaatgggagtccaacggtcaaccggagaacaattacaagaccactcctccagtcctggacagcgacggttcgtttttcctttactcgcgactcactgtggataagtcgcgctggcaagagggaaacgtgttctcgtgttccgtgatgcacgaagcactgcataaccattacacccaaaagtcactgagccttagcctcgga

SEQ ID NO: 15736 - DNA, 897 bp, synthetic construct
  misc_feature 1..897: note = source = /note="Description of Artificial Sequence: Synthetic coding sequence"
  source 1..897: mol_type = other DNA
atgaaatgggtgtcctttatctcactgctcttccttttttcctccgcttactcaggaagcctggataaacggcatggagaaggaaccttcaccagtgacgtgtcctcctacctcgaagagcaggccgccaaggagtttatcgcatggttggtgaaggggggtggaggaggcggaggaagcgggggcgggggtagtggcggcggcgggtctgccgaatcgaagtacggtccgccatgcccgccgtgtccagcgcctgaggcggcaggagggcccagcgtctttctgttcccgcctaaacctaaagacactcttatgatctcccggaccccagaagtgacctgcgtcgttgtggatgtctctcaggaagatccggaagtgcagttcaattggtacgtcgatggtgtggaggtgcacaacgctaagactaagcctagagaggaacaattcaattcgacctaccgcgtagtctccgtgttgacggtgctccaccaagactggctcaacggaaaagaatacaagtgtaaggtgtctaacaagggactgccgagctcgattgaaaagaccatcagcaaagcgaagggacagccgagggagccacaggtgtacactctgccaccctcacaagaggagatgactaagaatcaggtgtcgctgacctgcctcgtgaagggcttctacccgtcagacatcgccgtggaatgggaaagtaacggacaacccgaaaacaactacaagactaccccacccgtccttgactcggacgggtcattcttcctgtattcgcgactgactgttgacaagtcacgctggcaagagggaaacgtattcagttgctccgtgatgcacgaagctctccacaatcattacacgcagaagtcgctgagcctgtcgcttggt

SEQ ID NO: 15737 - DNA, 897 bp, synthetic construct
  misc_feature 1..897: note = source = /note="Description of Artificial Sequence: Synthetic coding sequence"
  source 1..897: mol_type = other DNA
atgaaatgggtatcattcatctctctgctgtttttgttctcgtcggcctactccggctcgctggataaacggcatggagaaggaacgttcacttccgacgtgtcgtcctacctggaggaacaggcagcgaaggaattcatcgcttggctcgtgaagggaggaggcgggggaggtggctcaggcggagggggctcgggaggaggaggaagcgctgagagcaaatacgggccgccgtgcccgccatgtcctgccccagaggccgcgggcgggccgtcggtgttcttgtttccgccaaagcctaaggacaccttgatgataagccgaactccggaagtgacctgcgtggtggttgacgtgtcacaggaggaccccgaggtgcagttcaattggtacgtcgacggagtggaggtccacaacgcaaagactaagccgagggaagaacaattcaacagtacttaccgggtggtgtcggtcctgacggtgctgcaccaggactggctcaacggcaaagaatacaagtgcaaggtgtccaataagggactcccatccagcatcgaaaagaccatctcaaaggccaagggacaaccgcgcgagccgcaagtctacactctccctccgagtcaagaggaaatgaccaagaaccaagtgtcgctcacgtgcctggtgaaaggcttttacccttcggacatcgccgtcgaatgggagtccaatgggcaaccagaaaacaactacaagacgactccccctgtgctggacagcgatggctcttttttcctctattcgcgcctgaccgttgacaagtcccgctggcaggaaggcaacgtgttctcctgctctgtgatgcatgaagcccttcataatcactacacccaaaagtccctgtcactttcgctggga

SEQ ID NO: 15738 - DNA, 897 bp, synthetic construct
  misc_feature 1..897: note = source = /note="Description of Artificial Sequence: Synthetic coding sequence"
  source 1..897: mol_type = other DNA
atgaagtgggtcagttttatttccctcctgtttctgttttcctccgcgtacagcgggagcttggataagcggcatggcgagggcactttcactagcgacgtgtcttcctatctggaagagcaggctgccaaagaatttatagcatggctcgtaaaaggcggaggcggcggtggcggatctggcgggggagggagcggcggcggtggcagcgccgaaagtaagtacgggccgccctgtcctccttgcccagcgcccgaggccgccgggggcccgtctgtattcctgttcccgccgaagcccaaagacactcttatgatctcaagaaccccggaggttacatgcgttgtggttgatgtgagccaggaagaccctgaagtgcagtttaactggtacgtggacggcgtggaagttcataatgccaaaacaaaaccccgggaagagcagttcaactccacctacagagtcgtttctgtgcttactgtcctgcatcaggattggcttaacggaaaagaatataaatgcaaggtgagtaacaaagggctcccatcttcaatcgagaagactatatccaaggctaagggtcagccaagggaaccacaggtgtacactctgcccccctcacaggaagaaatgacgaagaaccaggtgtccctgacatgcctggtcaagggcttttaccctagtgacatcgcggtggagtgggagtctaatggccagccagaaaataactataagacaacacccccagttttggattctgacgggtcttttttcctgtactcccgactcactgtggataagtctcggtggcaggaaggaaatgtgttttcatgcagtgtaatgcacgaagcgcttcataaccactatacgcagaaatctctttctctgagtcttggt

SEQ ID NO: 15739 - DNA, 897 bp, synthetic construct
  misc_feature 1..897: note = source = /note="Description of Artificial Sequence: Synthetic coding sequence"
  source 1..897: mol_type = other DNA
atgaaatgggtgtctttcatcagcctgctgttcctgttctcatccgcgtacagcggaagcctcgacaagagacacggcgaaggaaccttcacttcggacgtgtcgagctacctggaggaacaagccgcgaaggagttcatcgcctggctggtcaagggcggaggtggaggcggagggtcggggggtggaggatccggaggaggtggttccgctgaaagtaaatatggcccaccttgcccgccctgcccagccccggaggcggcaggcggcccttccgtgttcttgttcccaccaaagccgaaagacactcttatgatctcccggacgccggaagtcacctgcgtggtggtggacgtgagccaagaggatcctgaggtgcagttcaactggtacgtggatggagtagaagtgcacaacgccaaaactaagccgcgggaggaacagtttaactcgacttacagagtcgtctcggtgctcaccgtcttgcaccaggactggctgaatggaaaggagtacaagtgtaaagtgtcgaataagggactgccatcttccatcgaaaagaccattagcaaagctaagggacaaccgagggagccgcaagtctacactctccctccaagccaggaagaaatgaccaaaaaccaggtgtcgctgacctgtcttgtgaagggattttacccgtcggacatcgcagtggaatgggaatccaatggccagcccgagaacaattacaagaccactcccccggtgcttgatagcgacgggtcgtttttcctctactcacgcctgaccgtcgataagtcgcgctggcaggaggggaacgtcttttcatgctccgttatgcacgaagccctgcataaccattacacgcagaagtcactctcactcagcctgggg

SEQ ID NO: 15740 - DNA, 1740 bp, synthetic construct
  misc_feature 1..1740: note = source = /note="Description of Artificial Sequence: Synthetic coding sequence"
  source 1..1740: mol_type = other DNA
atgaaatgggtgagcttcatctcccttctgtttctcttcagcagcgcttattctggctctctggacaaaaggcacggcgagggaacctttacatctgacgttagctcctatctggaggaacaggctgctaaagagttcatcgcctggcttgttaaaggcagaggtcatggggaagggacatttacaagcgacgtatccagctacctggaagagcaagccgcaaaagagttcatcgcttggctggtgaaagggcggggccacggcgaaggcacattcacgagcgacgtgagcagctacctcgaagagcaggctgctaaggaattcatcgcctggctcgtgaaaggtagggggcatggagaaggaacattcacctccgatgttagttcgtatctcgaggaacaagcagccaaagaattcatcgcttggctggtcaagggccggggccatggggagggcacattcacctctgatgtatcttcatacctcgaagaacaggccgcaaaggagtttatcgcttggctcgtgaagggaaggggccacggagaaggaacgtttaccagcgacgtgtcatcttatctcgaagagcaggctgcgaaagagttcattgcttggctggtcaagggaaggggacatggagaaggcactttcacctccgatgtgtcctcttatctcgaggaacaggcagcaaaggagttcatcgcttggctggtcaagggaagaggccacggggaaggtacatttaccagcgacgtgtcctcttatctggaagaacaggctgcgaaagaatttattgcatggttagttaagggaaggggccatggagaaggcacttttacctctgacgtctcttcatacctcgaggagcaagcagccaaagagttcattgcttggctcgtgaagggtaggggacatggtgaagggactttcacatccgatgtcagcagctatctggaggaacaggccgcaaaggaatttattgcttggctggttaagggccgtgggggtggcggtggaggtggctctggcgggggtggcagcggaggcggaggaagtgcagagtccaaatatggccccccatgccccccatgtccagctcctgaggcggcaggtggtccatccgtctttttgtttccacccaaacccaaggataccctgatgatctccaggacacctgaggtcacttgcgtggtggtcgacgttagccaggaggatccagaagttcagttcaactggtacgtggatggagtggaggtccataacgctaagaccaaaccccgcgaggaacagttcaactcaacatatagagtggtgagcgtcttgacagttctgcatcaggactggctcaacggcaaggaatacaaatgcaaagtaagcaacaaagggcttcccagctctatagaaaagactatctctaaagcaaaagggcaacctagggagccacaagtctatacgttaccaccttcacaggaggaaatgacaaaaaaccaggtgtcactaacatgccttgtcaaggggttttaccccagtgacattgcggtggagtgggagtctaacgggcaacctgaaaataactacaaaacaacccctccggtgctggacagcgatggcagcttcttcctttactctcggctcactgtggacaaaagtaggtggcaagaaggcaatgtctttagctgctcagtgatgcacgaggctctccataatcactacacccagaaaagcttgtccctgtcgctcgga

SEQ ID NO: 15741 - DNA, 1740 bp, synthetic construct
  misc_feature 1..1740: note = source = /note="Description of Artificial Sequence: Synthetic coding sequence"
  source 1..1740: mol_type = other DNA
atgaagtgggtgtcattcattagcctgctttttttgttctcaagtgcctacagtgggtctctcgacaaacgtcacggcgaaggaaccttcacctctgacgtgtcttcatatctcgaagaacaagcagccaaagagttcattgcttggttggtcaaggggcgtgggcacggagaaggcacatttacatccgatgtttcatcctacctggaggagcaagcggcaaaagagttcattgcctggttggtcaaaggcaggggccacggggagggaacattcacatccgacgtgtcaagttatttggaggaacaggcagctaaggaattcatcgcttggctagtgaaaggcagaggccatggcgagggcacatttacatccgacgtgagtagctacctggaagaacaagccgcgaaggaattcatcgcctggctggtcaagggcagaggacacggggaaggaacattcacgtccgatgttagttcctacctcgaagagcaggctgccaaagaattcattgcttggttggttaaaggacggggccacggagagggtacattcaccagcgatgtatctagttacctggaagagcaggccgccaaggagtttatagcttggctcgttaaaggcagggggcacggcgagggcactttcacaagcgacgtctcatcttatctagaggaacaagctgctaaggagttcattgcctggctcgtaaaaggacggggacatggcgaaggaacattcactagcgatgtgtcctcttaccttgaagaacaggcagctaaagagtttattgcttggttagttaagggtcggggccacggggaggggacgttcacatcggatgtgtcttcttatttggaagaacaggctgctaaggagttcatcgcgtggctcgttaagggccggggccacggcgagggtaccttcacctccgacgtctcgtcatacctcgaggagcaggcggctaaggaattcattgcctggcttgtcaagggcaggggaggaggaggcggagggggatcgggtggcgggggaagcgggggcggaggcagtgcggaatccaaatatgggccgccctgcccaccatgccctgcgcccgaagcggccggcggcccttctgtcttcctcttcccccccaagccaaaagatacactgatgatcagtaggacgcccgaggtgacgtgtgtggtggtcgacgtgagccaggaggacccagaagtgcagtttaattggtacgtcgatggtgttgaggtccacaacgccaagaccaagccaagggaggagcagtttaacagcacttacagggtcgtgagtgttttaactgtgttgcatcaggactggctcaacggcaaggaatacaagtgcaaagtttccaataaaggcctcccatcaagcatcgaaaagacaatcagcaaggctaaggggcaacctagggagccacaggtatatacactgcctcccagccaggaggagatgacaaagaatcaggtgtccctcacctgcctggtcaagggattttaccccagcgatatcgcggtagagtgggagtctaacggacagccagagaacaactataaaacaacaccccctgtgctggatagcgatggctctttttttctgtattccaggctgacagttgataagtcccgctggcaggaaggaaatgtgttctcctgttccgttatgcacgaagcactccacaatcactatacgcagaaatcactgtcgctgtccctgggt

SEQ ID NO: 15742 - DNA, 1740 bp, synthetic construct
  misc_feature 1..1740: note = source = /note="Description of Artificial Sequence: Synthetic coding sequence"
  source 1..1740: mol_type = other DNA
atgaagtgggtgagcttcatctcactgctgttcctgttctcctctgcctactccggttcactggataagcgacatggtgagggaactttcacttccgacgtcagtagttacctcgaagaacaggccgcaaaggagttcattgcctggctggtgaagggacggggacatggcgaggggaccttcacctctgatgtctcctcctatctggaggagcaggcggcaaaagaattcatagcatggctcgtgaagggtcgcgggcacggggaaggtactttcaccagcgatgtgtcgtcgtaccttgaggaacaggcagcgaaggagttcatcgcatggcttgtcaagggcagaggtcacggagagggaacgttcaccagcgacgtgagctcgtacctggaggaacaggcggccaaggagtttatagcttggctggtaaagggacgcggccacggggaaggcacttttacctctgacgtctcaagctatcttgaggagcaggccgccaaagaattcattgcgtggctcgtaaaggggagaggtcacggggaaggaaccttcacctccgatgtgtcgagctatctcgaagaacaagccgcgaaggaattcatcgcgtggttggtgaaaggaaggggacacggagaaggaacgtttacctccgacgtctcctcctacctggaagaacaggcagctaaagagttcattgcatggctcgtcaagggccgtggccatggagaaggaactttcacgtcggatgtgagctcctaccttgaagagcaggctgctaaggagtttatcgcttggttggtcaaggggcgcggtcacggcgaaggaacttttacgtccgatgtgagctcatacctggaggagcaagcggctaaagagtttatcgcctggctcgtaaaaggaaggggtcatggagaggggactttcacttcggacgtcagttcgtacctggaagagcaagccgcaaaagagttcatcgcctggttggttaagggccggggaggaggtggtggaggcggatcgggcggtggcggcagcggaggtggagggtcagccgagtcgaagtacgggccgccttgcccgccatgccctgctccggaagcggcgggcggtccgtcagtgttcctttttccgcccaagccgaaagatactctcatgatctcgcggacccctgaagtgacctgcgtcgttgtggatgtttcacaggaggacccggaggtgcaattcaattggtacgtggacggcgtggaagttcataacgccaagaccaagccaagagaagaacagtttaacagcacctaccgcgtggttagcgtgctgactgtcctgcaccaagactggctgaacggcaaggaatacaagtgcaaagtgtccaacaagggattgccatcctcaatcgagaaaaccatctccaaggccaaggggcagccgcgcgaaccccaggtgtacactctgcccccaagccaggaggaaatgaccaaaaatcaagtgtcgcttacttgtctggtcaagggattctacccttcagacatcgcggtcgagtgggaatcgaatggacagccggagaacaactacaaaactactccaccggtgctcgactctgatggatctttctttctgtactcaagactgaccgtggacaaatcgcggtggcaagaagggaatgtgttctcctgttcggtgatgcacgaggctctccacaaccattacacccaaaagtcactgagcctgtcgctcgga

SEQ ID NO: 15743 - DNA, 1740 bp, synthetic construct
  misc_feature 1..1740: note = source = /note="Description of Artificial Sequence: Synthetic coding sequence"
  source 1..1740: mol_type = other DNA
atgaagtgggtgtccttcatctctctgctgttcctcttctcgtcagcttactcaggttcgctcgataaacggcacggcgaaggcaccttcactagcgacgtttcaagttacctggaggaacaggcggccaaggaattcatcgcttggctggttaagggtcgggggcacggtgaaggaactttcacttcagatgtgagtagctacttggaagagcaagccgccaaggagtttattgcttggcttgttaagggacggggccatggggagggaacgtttacgtcggacgtgagcagctacctcgaggagcaagcggcaaaggagtttatcgcctggttggtcaagggtcgagggcacggagaaggaacgttcacttccgatgtcagttcgtacctcgaagaacaagccgcgaaggagttcatcgcatggctcgtgaaggggcggggtcacggcgagggaaccttcaccagtgatgtgagctcctatttggaggagcaggccgctaaagagtttatcgcatggttggtaaaaggccgcggccatggagagggcacgtttacgtccgacgtcagttcctacctcgaagagcaggcagcgaaagagttcatagcgtggttggtgaaaggacgcggccatggcgaaggaaccttcacttccgacgtgtcatcgtaccttgaagagcaggcggccaaagagttcatcgcgtggctggttaaaggcaggggacacggagaaggtacctttacgtcggatgtctcgtcgtacctggaagaacaggctgccaaagaattcattgcgtggctcgtgaaagggcgcggacatggagaggggaccttcacctccgatgtgtcatcatatctcgaggaacaagctgcaaaagagtttattgcctggctggtcaagggcagaggacacggtgagggaacctttacctccgacgtctcgagctaccttgaggaacaagcggcaaaagaattcatagcctggcttgtgaaaggaaggggtggcggcggagggggagggtcgggaggaggcggttcgggagggggcggaagcgcggaatcgaagtacgggccaccatgccccccgtgcccggccccggaagctgccggcggaccttcggttttcctgttcccaccgaagcctaaggacactctgatgatctcccgcacccctgaagtcacctgcgtggtggtggacgtctctcaagaggacccagaagtgcagttcaactggtatgtggacggagtcgaagtccacaacgcaaagactaagcccagagaagaacagttcaattcgacctaccgggtggtgagcgtcctgaccgtgctgcaccaggattggctgaacggcaaggaatacaagtgcaaggtgtcgaataaaggactgccgtctagcatcgaaaagaccatctcgaaggcaaaggggcaacccagagagcctcaggtctacaccctgccaccgtcacaggaagaaatgactaagaatcaggtgagcctgacttgtcttgtgaagggcttctacccgtctgacatcgccgtcgaatgggaatcgaacggtcagccggagaacaattacaagaccactccgccagtgcttgattccgacggatcctttttcctgtactccagactcactgtggacaagtcgcgctggcaagaaggaaacgtgttctcatgtagcgtgatgcatgaagcactgcacaaccattacactcagaagtcactgagcctgtccctggga

SEQ ID NO: 15744 - DNA, 1740 bp, synthetic construct
  misc_feature 1..1740: note = source = /note="Description of Artificial Sequence: Synthetic coding sequence"
  source 1..1740: mol_type = other DNA
atgaagtgggtgtcatttatcagccttctctttttgttttcgtccgcatactccggctccttggacaagcgacacggcgaaggcaccttcacctccgacgtgtcgtcgtacctcgaagagcaggcagccaaggaattcatagcgtggctcgtgaagggtcgaggacatggagagggaaccttcacctcggacgtttcatcctacctcgaagaacaagctgcaaaagaattcatcgcctggctcgttaaaggtagaggtcacggtgagggaactttcacttcagatgtgagttcttacctcgaggagcaggccgcaaaggaattcattgcatggcttgttaagggaagaggccatggtgaaggtacctttacgtcggacgtttcgtcataccttgaagagcaagctgctaaagagtttattgcttggcttgtaaagggtcgggggcatggggaaggtacttttacttcagacgtgtcgagctaccttgaggagcaagcagcaaaggagttcatagcatggcttgtgaagggcaggggtcatggtgaggggacctttacctccgatgtgagttcctatctggaagagcaagcagcgaaagagtttatagcatggttggtgaagggccgcggacacggtgaagggacttttacttcggacgtttccagctacctggaggagcaggcagcgaaggagtttattgcctggctcgtcaaaggaagaggacatggggaaggaacctttactagcgatgtgtcctcgtacttggaagaacaggcagcgaaagaattcattgcgtggctggttaaggggcgcggacatggagaaggaacgttcacctcagatgtaagctcttacctggaggaacaagccgccaaggagtttatcgcttggttggtcaagggacggggacacggggaaggcacgtttacgagcgacgtctcgtcttacctggaagagcaggccgccaaagagttcattgcctggttggtcaaaggacgtggagggggcgggggtggaggatcaggagggggcggaagcggtggaggaggctccgccgaatcgaagtacggcccgccttgcccaccttgtccagcacctgaagctgcaggaggaccctccgtctttctgtttccccctaaaccaaaggatactcttatgatttcgcgtactcctgaggtcacctgcgttgttgtggatgtgagtcaagaggatcctgaagtccaattcaactggtacgtcgatggtgtggaagtccataacgcaaaaactaagcctagagaagaacagtttaacagcacctaccgcgtggtgtcagtgctgactgtgcttcatcaggattggctcaacgggaaagaatacaagtgtaaggtcagcaataagggtctgccaagctccattgaaaaaaccatctccaaggcaaagggtcagccaagagaacctcaagtgtatacgctgcctccatcccaagaagagatgaccaagaatcaggtgtcactcacttgtctcgtcaaaggtttttacccatccgacatcgcagtggaatgggaatcaaatgggcaacccgaaaacaactacaagactaccccgcccgtgcttgattcggatggtagtttctttctttactcaaggctgactgtcgataagtctcggtggcaagaaggaaatgtgtttagctgttcagtgatgcacgaggcgctgcacaaccattacacccagaagtcgctttcgctgtcgctgggg

SEQ ID NO: 15745 - DNA, 1740 bp, synthetic construct
  misc_feature 1..1740: note = source = /note="Description of Artificial Sequence: Synthetic coding sequence"
  source 1..1740: mol_type = other DNA
atgaagtgggtcagctttatctctttgctgttcctcttctcatcagcctactcggggagcctggacaagcggcacggagaggggacgttcactagcgacgtgtcgtcgtacctcgaagaacaggcggcgaaggaatttatcgcatggctggtgaaggggcgcggacacggcgaaggcaccttcaccagcgatgtgagctcgtatttggaggaacaggccgctaaggagttcatcgcctggcttgtaaagggacgcggccatggtgaggggacctttacctcagacgtctcctcctacctggaagaacaggccgcaaaagaattcattgcgtggctggtcaaagggcgcggccacggcgagggaacttttacctccgacgtctcgtcttacctggaagagcaagcagcaaaggaattcatcgcttggctcgtgaagggacggggacatggggaaggtactttcacttctgatgtgtcgtcatacctcgaggaacaagcagccaaagaatttatcgcctggctcgttaagggccggggacacggagaaggcactttcacctcggacgtgtccagctaccttgaagagcaagccgcgaaagaattcatcgcgtggctggtaaagggtcgaggccatggtgaaggaaccttcacttcagacgtgtcgtcctacctggaggaacaagccgctaaagaattcatagcctggctggtcaagggtaggggtcatggagagggaaccttcacctccgatgtgagtagctacttggaggagcaagctgccaaggagttcattgcttggttggtcaaggggcgaggccacggggagggaactttcacgagtgacgtgagctcatatctcgaagagcaggcggccaaggagtttatcgcttggcttgtgaagggaagaggtcacggcgaagggacttttacctcggatgtgtctagctacctcgaggagcaggccgcaaaggagtttattgcgtggttggtaaagggcagaggtgggggagggggaggaggctccggcggcggaggcagcggtggaggaggcagtgcagaatccaaatacggaccgccgtgcccaccctgtcctgcaccagaggccgcgggagggccttcggtctttctgttccctccaaagcccaaagacacgctgatgatctcgcgcaccccggaggtgacctgcgtggtcgtggacgtgtcccaggaggatccggaagtgcagtttaactggtacgtggacggagtggaagtgcacaatgcgaaaactaagcctcgcgaggaacagttcaattcaacctaccgggtcgtgtccgtcctgactgtgctgcatcaagattggctcaacggtaaggagtacaagtgcaaagtgtccaataaaggtctgccgtcgtcgatcgagaagactatctccaaagctaagggacagccgagggagccacaggtttacactctgcccccatcgcaggaggagatgaccaaaaaccaggtcagtcttacttgtctggtgaagggattctacccgtccgacatcgcagtggaatgggaatccaacggacagccagaaaacaattacaagactacgccgccggtgctggattctgatggcagcttcttcctctactcgagactgaccgtcgacaaatcccgctggcaagaaggaaacgtgttctcctgctcagtcatgcatgaagccctgcacaaccactacacccaaaagtccctctccctgagcctcggc

SEQ ID NO: 15746 - DNA, 1740 bp, synthetic construct
  misc_feature 1..1740: note = source = /note="Description of Artificial Sequence: Synthetic coding sequence"
  source 1..1740: mol_type = other DNA
atgaagtgggtcagtttcatcagcctgctctttctgttcagcagcgcatactcaggatctcttgataaaaggcacggtgaaggaactttcacttctgacgtgtcctcctacctggaggaacaggcagccaaggaatttattgcttggctagtaaaggggcgagggcacggcgagggtacctttacatctgatgtgagctcctacttagaggagcaagctgcaaaagaattcattgcatggttagtcaaaggacgcggccatggtgagggcacctttactagtgatgtcagtagctatctagaagaacaggcagcaaaggagtttatcgcctggctggttaagggacggggccacggagaaggtacctttacatcagatgtgtcttcatatctggaagagcaggccgccaaggagttcatcgcttggctcgtaaaaggtcgcggccacggcgaagggacctttactagtgatgtgagcagctatctcgaggagcaggccgccaaggaatttattgcttggctggtgaaagggcgcgggcacggcgagggcacattcacatctgacgtgagtagctacctcgaagagcaggccgcgaaggagttcatcgcatggctggttaagggtcgaggacacggcgagggcacatttacatcagatgtttcttcttacctggaggagcaggccgccaaggagtttatcgcgtggctggttaaagggaggggacacggcgaggggacgttcacatcagatgtcagctcttacctcgaggagcaagccgcaaaggagttcattgcctggctagtcaaaggacgggggcatggagaagggacattcacttctgacgtgagctcgtacctggaagagcaggccgctaaagagtttattgcttggctggttaaaggccgcgggcacggggagggaactttcactagtgatgtgtcatcttatttggaagaacaggcggccaaagagttcatcgcgtggctggtgaagggacgtggtggtggaggcggtggaggtagcggcggaggcgggtccgggggcggaggttcagcggagagcaaatatggtcccccttgccctccatgtcccgcacccgaagccgccggcggcccatctgtattcttgtttccccctaagcccaaggacacgcttatgatatcgagaacacctgaagtgacttgcgttgtggttgacgtgtcccaggaggatcccgaggtacagtttaattggtatgttgatggtgtagaagtgcacaacgccaaaaccaaacccagggaagaacagtttaatagcacatatcgcgtggtgtcagtgctcacagtcttacatcaggactggctcaatggaaaggaatacaagtgtaaagtaagcaacaagggacttccaagttctattgagaagacaatttccaaagccaagggccagccaagagagccgcaggtatatactctgcctccgagtcaggaggaaatgaccaaaaaccaggtgtccttgacttgtcttgtgaaaggattctaccccagcgacattgcagtagaatgggaatcaaatgggcagcccgagaataattacaaaacgactccccctgtgcttgattcggacggtagctttttcctctattcgcggctgaccgtggacaagagtagatggcaagagggtaatgtattctcatgttccgtgatgcatgaagccctgcacaatcattacacgcaaaaaagcctctcactttcccttgga

SEQ ID NO: 15747 - DNA, 1740 bp, synthetic construct
  misc_feature 1..1740: note = source = /note="Description of Artificial Sequence: Synthetic coding sequence"
  source 1..1740: mol_type = other DNA
atgaagtgggtgtcattcatcagtctgctgttcctgtttagttccgcctactcggggtccctggataaacggcacggcgaaggaacctttactagcgatgtgtcatcgtacctcgaagaacaagccgcgaaagagtttatagcttggctggtcaagggtaggggccacggggaggggacgttcacctccgacgtgagctcgtacctggaagaacaggcggcaaaggagtttatcgcttggctcgtgaaggggcgcggacatggcgaaggcactttcacgtcagacgtgtcgtcctatcttgaagaacaagcagcgaaagagttcatcgcgtggctcgtgaaaggaagaggacatggagaaggaactttcacttcagatgtctcgtcgtaccttgaagagcaggcagcaaaagagttcattgcttggctcgtcaaagggcggggtcacggtgagggtactttcaccagcgacgtttccagctacctcgaggagcaggcggccaaggaattcattgcctggctggttaagggcagggggcacggagaaggtacgttcacttcggacgtgtcctcttacttggaagagcaggccgcgaaggagttcattgcatggttggtaaagggccgcggacacggtgaaggaaccttcacgtcggacgtctcttcttatctcgaagagcaagccgcgaaggaattcatcgcatggctggtaaaaggcagaggccacggcgaagggactttcactagcgacgtatcttcatacctggaggagcaagcagctaaggagttcatagcttggttggtgaagggccggggacatggagaggggactttcacctcggatgtttcctcgtacctcgaggaacaggcggcgaaggagtttattgcgtggctggtgaagggacggggccatggagagggcacttttacctcggacgtctcctcgtatctggaggaacaagccgccaaggagttcatcgcctggctggtgaaaggtcgcgggggaggaggcggaggggggagcggaggcgggggaagcggaggaggtggaagcgccgagtcaaaatacggacctccgtgtccaccctgccccgctcctgaagcggccggtggcccttcggtgttcttgtttccgccaaagccaaaagataccctgatgatctcaagaaccccagaggtgacctgtgtggttgtggacgtgtcgcaggaagatccggaagtccagtttaactggtacgtcgacggggtggaagtgcataatgccaaaactaagccgcgcgaagaacagttcaattcaacctaccgcgtggtgtccgtcctgactgtcctgcatcaggactggcttaatggtaaggaatacaagtgcaaagtcagcaacaagggtctgccgtcctcaatcgaaaagaccatctctaaagccaagggacaaccgcgagagccacaggtctacactctgcctccgagccaggaagaaatgaccaaaaaccaggtgagcttgacctgcctggtgaagggcttctacccgagcgacatcgccgtggaatgggaatccaacggacagccggaaaacaactacaagaccacgcccccagtgcttgatagcgatggttcgttcttcctctacagccggttgaccgtcgacaagtcaaggtggcaagagggaaatgtcttttcttgcagcgtcatgcacgaggccctccacaaccactacacccaaaagagtctgtccctctcgctcgga

SEQ ID NO: 15748 - DNA, 1740 bp, synthetic construct
  misc_feature 1..1740: note = source = /note="Description of Artificial Sequence: Synthetic coding sequence"
  source 1..1740: mol_type = other DNA
atgaaatgggtatctttcatctctctgcttttccttttcagttccgcttactcaggatccctggataagaggcacggtgaaggcaccttcacatcagatgtgtcctcttacctcgaggagcaggccgctaaagaattcatagcttggctagttaagggaaggggacacggtgaaggtaccttcacttccgacgtatcctcctacctggaggaacaggcagccaaggagttcatcgcctggctggtaaaagggcgcggccacggcgaaggcacatttaccagcgacgtttcctcttacctcgaagagcaggcagccaaagagttcattgcttggctggtcaagggacggggtcatggcgagggcacctttacgtccgatgtgtcctcgtatctggaggaacaggcagcaaaggagttcatcgcttggctggtcaagggacgtggccatggagaaggcaccttcaccagcgacgtctcatcatatttagaggaacaggccgccaaagaatttatcgcttggcttgttaagggaaggggccacggggagggtacattcacctccgatgtctcctcttacttggaggagcaggctgccaaggaatttattgcttggttagtaaagggccgggggcatggagaaggcacattcacctccgatgttagctcatatctggaagagcaggcggccaaggaattcattgcctggttggtaaagggccgcgggcacggcgagggcacatttaccagcgacgtgagtagctacctggaggagcaagcagcaaaagagttcatcgcgtggttggtcaagggacgaggacatggagaggggacatttactagcgacgtgagtagctatttggaggaacaggccgcgaaggaatttattgcgtggctggtaaaaggtagagggcatggcgagggcacattcacctctgatgtgagctcatatctcgaggagcaggctgctaaagagtttattgcttggctcgtgaaaggcagaggcggaggggggggtgggggatctgggggcggaggctcaggtgggggaggttctgctgagtcaaagtacggacctccatgcccaccatgccctgctcctgaagcagccggagggccgtccgtttttctatttcctccaaaacccaaggacaccttgatgatttcgagaacacctgaggtaacatgcgtggtagttgacgtgtcccaagaagaccctgaagtgcagttcaattggtatgttgacggcgtggaagtgcacaatgccaaaacgaaaccaagggaggagcaattcaattcgacttacagagtagtctccgtcttgactgtgctgcaccaggattggttaaatggaaaggaatataagtgtaaagtaagtaataaaggcctgccctcgagcatagagaagaccatctcgaaagcaaaggggcagcccagggaaccccaagtatatactctgcctccctcgcaagaggagatgacaaaaaatcaggtaagcctgacatgcctcgtgaaagggttttacccctccgatatcgcagttgaatgggagtccaacggccagccagagaacaactacaagaccactcctccagtgcttgacagtgacggatcattcttcctttattcaagacttacagtggacaagtcccgttggcaggagggtaatgtgttcagttgctctgtgatgcacgaggcattgcacaaccattatacacaaaagagtttaagcctgtcgctgggt

SEQ ID NO: 15749 - DNA, 1740 bp, synthetic construct
  misc_feature 1..1740: note = source = /note="Description of Artificial Sequence: Synthetic coding sequence"
  source 1..1740: mol_type = other DNA
atgaagtgggttagttttatcagccttctgtttctgtttagctccgcctactcgggctctcttgataagcgccatggcgaaggaacctttaccagcgatgtgtcctcctacttggaggaacaagcagcaaaggaattcatcgcatggctggttaaaggtcggggtcatggcgagggaacgtttacctccgatgtctcctcatacctcgaagaacaagcagccaaggaattcattgcctggctcgtgaagggtcggggccatggtgaaggcacctttacgtcggacgtgtcgtcgtacctggaggagcaggccgcaaaagagttcatagcgtggctggttaagggtcgcggtcatggagaggggacgtttacctcagacgtgtcgagttaccttgaggaacaagcggcgaaggagtttatcgcttggctcgtcaagggacgagggcatggggagggcaccttcacctctgatgtgtcatcgtaccttgaagagcaagcggctaaggagtttatagcatggctcgtgaaaggtcgtgggcatggagaaggtacttttacttcagacgtatcatcctatctcgaagagcaggcagcaaaggagtttattgcctggctggtaaaaggccgaggacatggggaagggactttcacgtcagacgtctccagctaccttgaggagcaagcagcgaaggagttcatcgcctggctggtgaagggcagggggcacggtgagggcacgttcactagcgatgtctcgagttatcttgaagaacaggctgcgaaagaattcatagcctggctcgtaaagggacgcggacacggcgagggaacctttacttccgacgtgagctcatacctggaggaacaggcagctaaagagtttattgcatggcttgtgaagggaaggggccacggagaagggaccttcacttcagatgtgtcgagctacttggaagaacaggccgccaaagaattcattgcttggcttgttaagggaagaggaggaggaggtggcggaggttcgggaggaggaggaagcggcggaggaggaagtgcagaatctaagtacggtcctccttgtccaccttgtccagcgcccgaagcagcaggcgggccgagtgtgtttctgtttccacccaagcccaaggatactctgatgatctcccgtacccctgaagtgacttgcgtggtggtcgatgtctcacaagaagatccagaagtgcagttcaattggtacgtggacggcgtggaagtgcacaatgcaaagactaaaccgagagaagaacaattcaatagcacctaccgggtggtgtcggtccttactgtcttgcatcaggactggctgaacggaaaggaatacaagtgtaaggtcagcaacaagggactgccttcttccattgaaaaaaccatttcgaaagcaaagggtcaaccaagagaaccacaggtgtacacccttcccccttcgcaagaggagatgactaagaaccaggtgtcgctcacctgtctggtcaaagggttttatccttcagatattgcagtggaatgggaatccaacggtcagccggaaaacaattacaaaaccactccacctgtcctggattccgatggatcgtttttcctttactccagactgaccgtggacaagtccagatggcaagaaggtaacgtcttttcatgcagcgtgatgcacgaagcattgcataaccactacactcaaaagtccctgtcacttagccttggt

SEQ ID NO: 15750 - DNA, 1740 bp, synthetic construct
  misc_feature 1..1740: note = source = /note="Description of Artificial Sequence: Synthetic coding sequence"
  source 1..1740: mol_type = other DNA
atgaagtgggtcagttttatctccttgctcttcctcttcagctcagcctattcgggaagccttgacaaacgacacggcgagggaacgtttacatccgatgtgtcgtcctatctcgaagagcaggccgcaaaggaatttattgcgtggcttgtgaaaggccgtgggcatggggagggcacatttacttccgacgttagctcttacctcgaggagcaagccgcaaaggaattcatcgcatggttggtcaaaggccgtgggcacggggaaggcacatttacatccgacgtatcaagttatctcgaggagcaggccgccaaggagtttatcgcctggctcgtgaagggcagaggacacggtgaaggcacattcacttcggatgtgtcaagctacctcgaggagcaagcagcaaaagagtttatcgcatggctcgtcaaggggaggggtcacggagaagggacttttacctctgatgtctctagctaccttgaagagcaggcggcaaaggagttcattgcttggctggtgaaaggcagaggacacggtgaaggaacttttacgagcgatgtctcttcttacctggaggaacaggcagcaaaggagttcatcgcctggctggtcaaggggaggggccacggggagggcactttcacaagtgatgtgagcagctacctcgaagagcaggccgcgaaggaatttatcgcctggctggtcaagggcaggggccacggcgaagggacatttaccagcgatgtttcctcatatttggaggagcaagcagcaaaagagttcattgcatggttggtcaagggaaggggccatggggagggaacgttcacatctgatgtatcatcctacctcgaggagcaagcagccaaggagttcatcgcatggctggtgaagggaagaggccacggcgaggggacctttacttccgatgtttccagttacctcgaggaacaagccgccaaggaatttatcgcatggttagtgaaaggccggggaggtggaggggggggagggagcggtgggggaggaagcggtggcggcggatccgcagagagcaagtacgggcctccttgccctccgtgtcccgcacctgaggcggcaggcggaccaagcgtcttcctgtttccacctaaaccaaaggacactctaatgattagcagaactcctgaagtgacgtgcgtcgtcgtggatgttagtcaggaggatccagaagtgcagtttaattggtacgtggacggcgtggaagtacacaatgccaaaacaaaaccgagggaagagcagtttaattctacctaccgtgttgtctctgttctcaccgtgctccaccaagattggctgaacggcaaggaatacaaatgtaaggtaagcaataaagggttaccttccagcattgaaaaaacaatcagcaaggcaaaaggccagccaagagaaccccaggtgtacaccttgccgccttcccaggaggagatgacgaaaaaccaggtcagcctgacctgtctggttaagggtttctacccctccgatatagccgtcgaatgggaatcaaacggtcaacctgagaacaactacaagacaaccccaccagtcctggattcagatggctccttctttctgtacagtaggcttactgtggataagtcacggtggcaggaaggtaatgtgttttcatgttcagtcatgcatgaggctttacataaccactacacccagaagtctctatctcttagtctggga

SEQ ID NO: 15751 - DNA, 1740 bp, synthetic construct
  misc_feature 1..1740: note = source = /note="Description of Artificial Sequence: Synthetic coding sequence"
  source 1..1740: mol_type = other DNA
atgaagtgggttagcttcatcagcttgctgttcctctttagttccgcctactccggcagtctggacaagagacatggtgagggaacgttcacctcggatgtttcgtcgtaccttgaggagcaagcagctaaggagttcattgcatggctcgtcaagggcaggggtcatggtgaaggaacattcactagcgacgtctcatcctacttggaggaacaggctgcaaaggaatttatcgcatggctggtgaaaggtcgcggtcacggcgagggcacttttacctccgatgtttcgtcctatctagaggagcaggcggcgaaagagttcattgcttggctggttaagggccgcggccacggcgaaggaaccttcacgtccgatgtttcttcctacttagaagaacaggcagccaaggaatttatcgcgtggctggtgaagggccgcggccacggtgaaggaacgttcacctccgatgtgtctagctacctggaggagcaggcagctaaagagttcatagcctggctcgtcaaaggcaggggacacggtgaaggcacgttcacctcggatgtgtccagctacctggaagagcaggccgcgaaggaatttatcgcgtggctggttaagggccgtggccacggtgaaggaaccttcaccagtgacgtttccagctatctggaggagcaagcggccaaggagttcatagcatggctggtgaagggtcggggtcatggcgagggcacttttacgagcgatgtctcctcctatctcgaagaacaggccgctaaggaattcattgcttggctcgtgaagggccgtggccatggagagggcactttcacatccgatgtatccagctatttggaggagcaagcagctaaagagttcatcgcctggctggtgaaaggcaggggccatggggaaggcacattcacgtcagacgtgtcctcgtacttggaggagcaggctgccaaagaatttatcgcctggctggtaaagggtcgaggcggtggaggcggaggtggctctggcggcggaggaagcggaggcggcggtagcgccgagtccaagtacggcccaccctgtcctccatgcccggccccagaggccgcaggaggtccaagtgtgttcctgtttccgcccaagcccaaagacacactgatgatcagccgtacaccggaggtgacgtgtgttgtggtcgatgtgtcccaggaggacccggaggtccagttcaattggtacgtggacggcgtggaggtccataacgcgaaaacaaaaccgcgtgaggagcagttcaatagcacctaccgagtagtgtccgtgttgacggtgttgcatcaggactggctgaatggaaaggagtacaaatgtaaggtgtcaaataagggcttgccgtcgagcattgagaaaaccatctccaaagcgaagggtcagccccgcgagccgcaagtgtacaccctgcccccaagccaggaagagatgaccaaaaaccaagttagtctaacttgccttgtgaagggattctatccgtcagatatcgctgtcgagtgggagagtaatggccagcccgaaaacaactacaagaccacgccgcctgtgctagactctgacggttctttcttcctctattccagactgacagttgataaaagccggtggcaggagggaaatgttttctcatgttcagtgatgcacgaggctctgcacaaccactacacacagaagtcgcttagtcttagtctgggc

SEQ ID NO: 15752 - DNA, 1740 bp, synthetic construct
  misc_feature 1..1740: note = source = /note="Description of Artificial Sequence: Synthetic coding sequence"
  source 1..1740: mol_type = other DNA
atgaagtgggtctctttcatcagcctgcttttcctgttcagcagcgcgtattctggctctctggacaaacgccatggtgaaggtacctttacgtccgatgtcagcagctatctggaggaacaagcagctaaagaatttatagcgtggctggtcaagggccgcgggcacggtgagggcacgtttactagcgacgtatcatcttatctggaagagcaggccgcgaaggagttcatcgcttggcttgtgaaaggtcgcggacacggtgagggtacatttaccagcgacgtcagctcctatctggaagagcaagcggctaaggaatttattgcttggctggtcaagggccgcggtcatggtgaaggcacttttacgtctgatgtgagcagctatttggaggaacaagctgcgaaggaatttattgcgtggctggtaaagggccgcggccacggtgaagggaccttcacgagcgacgtgagctcatatctggaggagcaagcagcgaaggagttcatcgcatggctggtgaaaggtcgtggtcacggtgaggggacttttacgtctgacgtgtctagctatctggaggagcaagccgccaaggagtttatcgcgtggttggtgaagggtaggggtcatggtgagggaactttcaccagcgacgtcagtagctacctggaagagcaggctgctaaagagtttatcgcttggttggtaaagggccgaggccacggtgaggggactttcacttcggacgtgagctcctacctggaggaacaggcagcaaaggagttcatagcatggctagtgaagggtcggggccatggggaggggacattcaccagcgacgttagcagctacctcgaggagcaagctgccaaagagtttattgcttggctcgtcaaaggtcgcggccatggggaaggtaccttcacctccgatgtatccagctacctggaggaacaggctgctaaggaatttatcgcctggctggtgaaagggcgcggcggcggtggtggcggtggttctggcggtgggggtagcgggggtgggggtagcgcagaaagcaaatacgggccaccctgcccgccatgcccagcaccggaagctgcgggcggaccaagcgtgttcctgtttccaccaaagccgaaagataccctcatgattagccggaccccagaagtgacctgcgtcgtcgtggacgttagccaggaagatcctgaggtccagtttaactggtatgtagacggtgtggaggtgcataacgcaaagacaaagccacgcgaggaacagtttaacagcacctatcgtgtggtgtcggtcctgaccgttctccaccaggattggttgaacggaaaggagtacaagtgtaaagtgagcaataagggactcccgtcaagcattgagaagactatctccaaagcaaagggtcagccgcgcgagccgcaagtctatacgctgcctccgtcacaagaagagatgaccaagaatcaggtcagcctcacttgtctggtcaaaggcttctatccaagcgacattgccgtggaatgggagtcgaatggccagccggaaaacaactacaagaccactccaccagttctggacagcgacggttcttttttcctgtactcacggttgaccgttgacaagagccgttggcaggaaggcaatgtgttcagctgcagcgtgatgcacgaagcactgcacaatcattacacccaaaagagcctcagcctgagcctgggt

SEQ ID NO: 15753 - DNA, 1740 bp, synthetic construct
  misc_feature 1..1740: note = source = /note="Description of Artificial Sequence: Synthetic coding sequence"
  source 1..1740: mol_type = other DNA
atgaaatgggtgtcgttcatttccttactgtttctgttcagttcagcttattcaggcagccttgacaagcggcatggggagggaacattcacctcagatgtgagctcttacctcgaagaacaggccgcgaaggaattcatcgcatggctggttaagggacgcggccacggagagggaacctttaccagcgacgtgagctcctatctcgaagagcaggccgccaaggaatttatcgcttggctcgtgaagggcaggggccacggggaaggcacgttcacgtctgatgtttcctcttatctggaggagcaggcagcaaaggagttcatcgcttggttagtgaaagggcgcggccatggcgagggaaccttcactagtgacgtaagttcatatctcgaagagcaagctgccaaggaatttatagcatggttagtcaagggacggggacacggagagggcaccttcacatcggatgtatcctcttatctggaggagcaagcggccaaagagtttattgcctggcttgtcaagggcagaggacacggagaggggacatttacctccgacgtgagcagctatttagaagaacaagctgccaaagaatttatagcctggcttgtaaaaggaaggggacatggggaagggacctttacaagcgatgtgagctcatacttagaggaacaagcggctaaagaatttattgcttggttggttaagggccggggccatggggaaggaacgtttacctcggatgtgtcgtcctaccttgaggagcaggccgcgaaagagttcatcgcgtggctagtcaaaggccgtggccatggagagggaacattcacttcagatgtgtcctcttacttagaagagcaggccgcaaaagagtttatcgcatggcttgtcaaaggacgcgggcacggtgagggaacattcacatcagacgtgagttcctacctggaagaacaagccgcgaaagaatttattgcctggttggtcaaggggcgtggaggaggtggagggggagggagcggaggaggtggcagcggaggaggcggttccgcagagtccaagtacggacctccttgccctccgtgccctgccccagaagcagccggaggtccctctgtgtttctgttccctccaaaacccaaggatactctgatgataagtcgaacaccggaggtaacctgtgtggtagtagatgtttcgcaggaggatcctgaagtccaatttaactggtatgtcgatggggttgaagtgcacaatgccaaaaccaagcccagggaggagcagtttaactcaacatacagagttgtgagcgtactgacggttttgcaccaggactggctcaatgggaaggaatataaatgtaaggtaagcaataagggtctgccatctagcatcgagaagaccatcagcaaggccaaggggcagccacgagagccccaggtgtatacactgccaccttctcaggaagagatgactaagaaccaggtttcgctcacatgtctcgtgaagggtttctatccatccgatattgccgtggaatgggagagtaatggtcagccagagaataattataagacaacacccccggtgctggacagtgatggtagcttttttctgtacagtcggctgaccgtggacaaaagtagatggcaggaaggaaacgtcttttcctgttcagtcatgcacgaagccctgcataatcactatacacagaagagtctgtctctctctctggga

SEQ ID NO: 15754 - DNA, 1740 bp, synthetic construct
  misc_feature 1..1740: note = source = /note="Description of Artificial Sequence: Synthetic coding sequence"
  source 1..1740: mol_type = other DNA
atgaaatgggttagcttcattagcctgctgtttctattcagctcagcttactcaggctctcttgataagagacacggcgaggggactttcacttcagatgtctcttcatacctggaggagcaggctgcaaaagagtttattgcttggctggtaaaaggaagaggccatggagaagggacgttcacaagcgatgtgagcagttacctcgaggagcaggccgccaaggagtttatcgcttggctggttaaagggcggggacacggcgagggaacctttacaagcgatgtgagcagctatttggaggagcaggcagctaaggaatttatcgcatggctggtcaaagggcgggggcatggggaggggacatttacttccgatgtgagctcctacttggaggaacaggccgccaaggaatttattgcctggttagtgaagggtcgaggacatggagaaggaactttcacatccgacgttagttcatatctggaagagcaggctgcgaaggaattcattgcctggctcgtcaaaggccggggccatggtgaaggcaccttcaccagtgacgtgagctcctacttggaagagcaggccgccaaagaattcatcgcctggctcgtgaagggacgtgggcacggcgaaggcactttcactagcgacgttagcagttatctcgaagagcaggctgccaaagagttcattgcctggctagtgaagggcagaggacatggggagggcactttcacaagtgacgtatcctcctacctggaagagcaagccgccaaagaattcatcgcctggttggtgaaaggaagaggccacggcgaagggacattcacctctgatgtgagctcctaccttgaggaacaagctgcaaaagaattcatagcctggttggtcaagggccggggtcatggagaggggacctttacctccgacgtctcatcataccttgaagaacaggctgccaaggaatttatagcttggctggtgaagggcagaggtgggggtggaggtggcggttctgggggcggagggtctggtgggggagggagtgctgaatccaagtatggacccccttgtcccccttgtcccgcccccgaagccgccggcggaccttccgttttcttgttcccaccaaagcctaaagatacactgatgatttctcgaaccccagaggtgacctgcgtggtcgtcgatgtgagccaagaagatccagaggtgcagtttaactggtatgtagatggagtggaggtgcacaacgcgaaaactaaaccaagagaggagcagttcaatagtacttatagagtggtgagcgtacttacagtgctgcaccaggactggctgaatggaaaagaatataagtgtaaggtgtccaacaaaggactgcctagcagcattgaaaagacaatcagcaaggcaaaaggacagccccgggagccccaggtgtacactttgcctcctagccaggaagagatgaccaagaatcaggtaagtcttacgtgtttagtgaagggcttctacccgtcggacatcgccgttgagtgggagagcaatgggcagccggaaaacaattacaagactacccccccagtactcgattctgatggcagcttctttctgtactccaggttgaccgtcgacaagtctagatggcaggagggcaacgtgttttcttgcagcgtcatgcacgaagcattacataatcattatacacagaagtcacttagtttgagcctgggc

SEQ ID NO: 15755 - DNA, 1740 bp, synthetic construct
  misc_feature 1..1740: note = source = /note="Description of Artificial Sequence: Synthetic coding sequence"
  source 1..1740: mol_type = other DNA
atgaagtgggtttccttcatcagcttgctgttcctctttagctccgcctatagcgggagcctcgataagaggcatggggagggaacatttacctcagacgtgtcgtcctaccttgaagagcaggccgcgaaagagtttatcgcctggctggtgaaaggccgcggccatggcgaaggcacctttacctctgatgtgagttcctatctggaggagcaagcagccaaagagtttatcgcctggcttgtgaagggccgcggccatggagagggaaccttcacaagcgacgtttcctcctacctcgaagaacaggctgccaaagaatttattgcctggctggttaaggggcgggggcacggagagggcacctttacctccgatgtctcatcttatctggaagagcaggcggctaaggagtttatcgcatggctggtgaaggggaggggccacggagaggggacgttcacatccgatgtctccagctacctggaggagcaggcggccaaagaatttatcgcctggctggtgaagggccgcggacacggcgaggggacctttacatccgacgtgtcaagttatctcgaagaacaggccgctaaggagttcatagcatggctagtgaaagggagggggcacggtgaagggacattcacatccgacgtaagctcctacctggaagaacaggccgcaaaggagttcattgcttggctggtaaagggaagaggacacggcgaagggaccttcacaagtgatgtatcttcgtaccttgaggagcaagcggcaaaggagttcatcgcctggcttgtgaagggccgggggcacggtgaggggacatttacctctgatgtttctagctacttagaggaacaggccgccaaggaattcatcgcttggttggtaaaaggccgtggtcatggagaagggacgtttacgtccgacgtgagtagttatctggaggagcaggctgccaaggagttcatcgcttggttagtgaaaggccgtggcggaggaggcgggggcggatctggagggggaggttccggcggaggcgggagcgctgagtccaaatacggtcctccctgccctccttgtcctgccccagaagccgctggaggcccctccgtgtttctctttccaccaaagccaaaggacaccttaatgatctcaaggacgcccgaggttacatgcgtggtcgtggatgtcagtcaagaggatccagaggtgcagtttaattggtatgtggatggcgttgaggtccacaacgctaagactaaacctagggaggaacaatttaacagtacctacagggtagtgtccgtgttgacagtgctccaccaagactggctaaacggcaaagaatacaagtgcaaagtatccaataaagggcttcccagttcaatcgagaaaaccatcagtaaggctaagggtcagccacgagaaccccaggtctacaccctgcccccttcccaggaggagatgaccaagaatcaagtctctctgacctgtcttgttaaaggattctatccttccgatatcgcagtggagtgggagtccaatggccaaccggaaaacaactacaagaccaccccccccgtgctggatagtgacggctcctttttcttatactctcggttgacagtggacaaaagcaggtggcaggagggtaacgtgttctcttgcagtgttatgcacgaagcgctgcacaatcattatacacagaaaagtttgagcctatctttgggg

SEQ ID NO: 15756 - DNA, 1740 bp, synthetic construct
  misc_feature 1..1740: note = source = /note="Description of Artificial Sequence: Synthetic coding sequence"
  source 1..1740: mol_type = other DNA
atgaagtgggtttcctttatttcactgctctttttgttcagcagtgcatacagtggcagcttggataagcggcatggggaggggacatttacctccgatgtgtcatcttacctggaagaacaggcggccaaagaattcatcgcttggctggtcaagggcagagggcatggcgaaggcactttcacctccgatgtgtcctcctacctggaggaacaggccgccaaagagtttatagcgtggctggtgaagggccgaggccacggcgagggcactttcacatcagatgttagcagctatctggaggaacaggctgcaaaggaattcatagcttggctcgtgaaaggcagaggccacggcgaggggactttcacctccgacgtgagttcctacctagaagaacaggccgcaaaagaattcatcgcgtggctggtcaaaggcagagggcacggagaaggcactttcacctccgacgtgagctcgtacctcgaagagcaagctgccaaagaattcatcgcatggctcgttaagggaagagggcacggggaggggaccttcacatccgacgtgtcttcctatctggaagagcaggcggccaaggaatttatagcctggctggtcaaaggtcgagggcacggagagggcaccttcacatccgacgtgtcctcttacttggaagagcaagcagccaaggagttcatagcttggctcgtgaagggcagaggccacggggagggcacttttacttccgacgtatcctcttatctggaagagcaagccgccaaggagtttatcgcatggctcgtaaaggggaggggacacggggaggggacctttacatccgacgtgtctagctacctggaggaacaggccgcaaaagaattcatcgcatggctggttaaaggacgcggccacggtgaggggacctttacctcagatgtatccagttatctggaagagcaggcagccaaggaattcattgcttggttggtgaagggtagaggcgggggcggcggtggtggatctggcggtggcggatccggtggtggaggatccgctgagagtaaatatggtcccccatgcccaccttgccctgctcctgaggcagctggagggccgtccgtgtttctcttcccgccaaagcctaaagacaccctaatgattagtcgcacacctgaggtaacttgcgtcgtggtggacgtgagccaggaggaccccgaagtacaattcaactggtatgtggacggcgtggaagtgcacaacgccaaaaccaagcccagggaagagcaattcaatagtacttaccgggtggtcagcgtactgacagtgctccaccaggattggctgaatggaaaggagtataagtgtaaggtctctaacaaggggctgcctagctctatcgaaaaaacaattagcaaggccaagggtcagcctcgggagccccaggtgtacacactgcctccatcacaggaggaaatgacgaagaaccaggtgtcccttacatgtcttgtgaagggcttttacccatctgacatcgcagttgagtgggagtcgaacggacagcctgaaaacaattacaagactacgcctcccgtgctcgattcagacggttcctttttcctgtatagcagactgaccgtcgataagagccggtggcaggagggtaacgtgttttcttgcagtgtgatgcacgaggccctgcataaccactatacgcaaaaaagcctgtcattgagtttagga

SEQ ID NO: 15757 - DNA, 1740 bp, synthetic construct
  misc_feature 1..1740: note = source = /note="Description of Artificial Sequence: Synthetic coding sequence"
  source 1..1740: mol_type = other DNA
atgaaatgggtgtctttcattagcctactcttcttgtttagttcggcgtattcaggtagcttggacaaacgccacggggaagggaccttcacctctgacgtatcctcttaccttgaggaacaggcagccaaggagtttatcgcgtggttggttaaagggcggggccacggggagggcaccttcacttccgacgtgtctagttatcttgaagagcaagctgccaaggagttcatcgcatggttagtaaaggggagagggcacggtgaaggcacgtttacatccgacgtgtcaagctaccttgaggagcaggccgctaaggagtttattgcttggctggttaagggcagggggcatggagagggcacctttaccagcgatgtgagtagttacctggaagagcaggctgcgaaagagttcattgcatggctggtaaagggaagggggcacggggagggaaccttcacctccgacgtgagcagctatctagaggagcaggccgcgaaagagttcattgcctggctagtgaaaggcaggggccatggcgaaggaacgttcacttctgacgtttcatcctatttagaggaacaggctgctaaagagtttattgcctggcttgtcaaaggccggggacacggagagggcacttttacttctgacgtctcttcatacctagaggaacaggctgccaaggaatttatcgcttggctggtgaaagggaggggccacggagaaggtacctttacatccgatgtatctagctatctcgaggagcaggccgccaaggaattcatcgcatggcttgtgaaaggcagaggtcatggcgagggcacattcacttctgacgtctcatcatacctcgaagaacaggccgcaaaggaatttatcgcctggctcgtgaaggggaggggacacggggaaggaacattcacgtctgatgttagttcttacctggaggagcaggccgccaaggagtttattgcctggctcgtaaagggcaggggcggcggtggaggaggcgggagtggcggcgggggaagcggcggggggggttctgccgaatccaaatacgggccaccctgccctccttgtccagcccccgaggccgcgggcggcccgtccgtgttcctcttccctcctaaaccaaaagatacactcatgatttcccgcactcctgaggtcacctgcgttgttgttgacgtttcccaagaggacccagaagtccagttcaattggtacgtcgatggcgtagaggtccacaacgctaaaaccaaaccaagggaggaacagtttaactccacttaccgtgtggtatccgtgctaacagtgctacatcaagactggttgaacggtaaggagtataagtgcaaggtctctaataaggggctcccttcctcgattgagaagaccatctccaaagcaaagggccagccaagggagccgcaagtgtacactctgcctccctcccaggaggaaatgactaaaaaccaagtgagccttacttgcctcgtgaagggcttctacccatctgatatagctgttgaatgggagtcaaacggccaacctgagaacaactacaaaactacacccccggtgctggattctgatggctccttctttctctattctcggctcaccgtggacaaatcaaggtggcaggaagggaacgtgttttcgtgctcagtgatgcatgaggcactgcacaaccactacacacaaaagtcgttgtctctgtccctaggc

SEQ ID NO: 15758 - DNA, 1740 bp, synthetic construct
  misc_feature 1..1740: note = source = /note="Description of Artificial Sequence: Synthetic coding sequence"
  source 1..1740: mol_type = other DNA
atgaaatgggtgtcttttatcagtcttctgtttctgtttagctccgcctacagcggcagtctggataagaggcatggcgaggggacatttacaagcgatgtgagcagctatttggaagaacaggccgctaaggaattcattgcttggctggtgaagggaagggggcacggtgagggtaccttcactagtgacgtgtcatcttaccttgaggaacaggcggctaaggagtttattgcatggctcgtgaagggccgaggacatggtgaaggcacattcacttctgatgtcagtagctatctggaagaacaggccgcaaaggaattcatcgcctggctggtcaagggtcgcggacacggcgagggtaccttcacaagtgatgtgagttcatacttggaagaacaggctgccaaggaattcattgcttggctggttaaaggcagggggcacggagaggggacctttacatctgacgtaagctcttaccttgaggagcaagccgcgaaagaatttatcgcctggcttgtgaagggcagaggacacggtgaaggaaccttcactagcgacgtgagcagctacttggaggagcaggcagccaaagagttcatcgcctggctcgtgaagggtagaggtcacggcgaaggtaccttcacatccgacgtttcttcatacttggaggagcaggctgccaaagaatttattgcgtggctggtcaaggggcgcggtcacggtgaaggcacattcacctctgatgtttcatcttatctcgaagaacaagcagccaaggagttcatcgcctggttggtcaagggaagagggcacggtgaaggaacattcactagtgatgtgagtagttaccttgaggagcaggcggcaaaagaatttatcgcctggctcgtgaaaggccggggccatggggagggaacatttacttccgacgtgtccagctaccttgaagaacaggccgccaaggaatttattgcttggctggtcaagggccgcgggggagggggcggaggcggttctggcggggggggttccggtggtggcggctccgccgagtccaagtatggacctccttgccctccttgccctgcaccagaggccgctggggggccttccgttttcctttttccaccaaagcctaaggacacccttatgatcagcagaacacccgaggtaacttgtgtggtcgtcgatgtgtctcaagaggaccccgaagtccagttcaattggtacgtggatggagtggaggtgcataacgctaaaacgaagcccagggaagagcagttcaacagcacttatagggttgtgtctgtgctgaccgtcctccaccaggattggctcaacgggaaagagtacaagtgcaaggtcagcaataaggggctcccctccagcatcgaaaaaacaatttctaaggcaaaggggcagcctagggagccgcaggtgtacactctgcccccatcccaggaagaaatgacgaaaaatcaggtcagtctcacttgccttgtcaaggggttttacccgtcagatatagcagttgaatgggaaagcaatgggcagccggagaacaattataaaacaactccacctgtgctggatagcgacggtagcttctttctgtattccaggctgacagtggacaagtccagatggcaggaggggaatgtgttcagctgtagcgtgatgcatgaagccttgcacaatcactacactcagaagtccctgagcctctcactgggg

SEQ ID NO: 15759 - DNA, 1740 bp, synthetic construct
  misc_feature 1..1740: note = source = /note="Description of Artificial Sequence: Synthetic coding sequence"
  source 1..1740: mol_type = other DNA
atgaaatgggtgtcatttatctcgctgctctttctcttttcgtcggcctactccgggagccttgataagcgccatggagagggtacctttacctcagacgtctcgtcatacctcgaagaacaagcagctaaagagtttatcgcttggctggtcaagggtcgcggtcatggagaaggaacctttacttcggatgtgagttcctatttggaagagcaggcggcgaaagagtttatagcctggcttgtcaagggcagagggcatggggaaggcacgtttacttctgatgtgtcatcatacttggaagaacaggccgcgaaggaattcatagcatggcttgttaagggacggggtcacggagaagggacgtttacgagtgacgtgagttcatacctcgaggaacaagcagcgaaggagttcatcgcctggctggtaaaaggaagaggtcacggggaagggacctttacttccgatgtctcctcctaccttgaggagcaggcagctaaagaattcattgcctggcttgtgaagggtcgaggccacggggaggggacttttacgtcggacgtctcctcgtatctcgaggaacaggccgctaaggagtttattgcctggctcgttaagggtaggggtcatggtgagggaacctttaccagcgatgtgtcctcctatctggaagaacaagccgcaaaagaattcatcgcatggcttgtaaaagggagaggtcatggcgagggaactttcaccagtgatgtcagctcctacttggaagagcaagcggccaaagagttcattgcttggcttgtaaagggtcgtggtcatggtgaaggcaccttcacctcggacgtgagcagctacctcgaagagcaggcagcaaaggaattcattgcatggctggtgaagggcagaggacacggcgaagggactttcactagcgatgtgtcgtcatacctggaggagcaagcagcaaaggagtttatcgcctggttggtgaagggccgaggaggtggaggaggagggggctcgggcggaggaggttccggaggtggcggatccgcagagtccaagtacggacccccttgccctccctgtccagcaccagaagcagccggaggtccgtcggtctttctctttcccccaaagcctaaggacactctgatgattagcagaactcctgaggtgacgtgtgttgtggtcgatgtgagccaggaagatcccgaagtccaattcaactggtacgtggacggtgtcgaagtgcacaacgcaaaaaccaaaccacgcgaagaacaattcaactcgacctaccgggtcgtgtccgtgctgacggtcctgcatcaggattggcttaatgggaaagaatacaagtgtaaggtgtcgaacaaggggctgcctagttctattgaaaagaccatatccaaggcaaagggtcagcctcgggagccgcaagtgtacacccttccgccttctcaagaggagatgactaagaatcaggtgtccctgacctgtttggtgaaaggattttacccatcagatattgcagtggaatgggaatcgaatggacaaccagaaaacaactacaaaactactcctccagtgctggacagcgacggttcgttctttctgtactccaggctcaccgtggataaaagcaggtggcaagaaggcaacgtgttctcctgctctgtcatgcacgaagcacttcataatcattacacccaaaagagcctttcactgtcgcttgga

SEQ ID NO: 15760 - DNA, 1740 bp, synthetic construct
  misc_feature 1..1740: note = source = /note="Description of Artificial Sequence: Synthetic coding sequence"
  source 1..1740: mol_type = other DNA
atgaagtgggtgtccttcatctccctgctgtttttgtttagtagcgcctattcaggctccctggataaaaggcacggcgaggggacattcactagcgatgtctcttcctatttggaggaacaggctgcgaaagagttcattgcgtggctggtgaaggggcgaggccacggcgagggaaccttcactagtgacgtctcgtcttatctcgaggagcaggccgctaaggaattcattgcctggcttgttaaaggccggggacatggagaggggaccttcacttcagacgtgtcctcatatttagaggagcaggccgccaaagagttcatagcttggttagtcaaaggacggggtcacggcgagggcacctttacaagcgacgttagctcttacctcgaagaacaggctgcgaaagagttcatcgcctggttggtcaagggccggggccacggtgaagggacgttcacaagtgacgtcagctcttacctagaggagcaggccgccaaggaattcattgcctggttagtgaaaggtagggggcatggagaaggcacttttaccagcgacgtgtcttcgtacctggaggaacaagcagctaaagaatttatcgcatggctcgtcaagggtcgcgggcatggcgaaggaacattcaccagcgatgtctcaagctatctggaagaacaagccgcgaaggagtttattgcttggctggtgaagggtagggggcacggcgaagggacatttacaagcgatgtttcctcgtatcttgaggaacaggcagcgaaagaattcatcgcctggctcgtgaaggggcgcggccacggagagggaaccttcacatctgatgtctcctcttacttggaagaacaggccgctaaggagttcattgcctggttagtcaaaggccgagggcatggggagggaacatttacctcagacgtgtccagctatctggaagagcaggcagctaaggaattcatcgcgtggttagtaaaaggtaggggcggaggagggggcggcggatctggcggaggcggaagcggtgggggcgggagtgctgaatccaagtatgggccaccttgtccgccatgtccagcacctgaggcagccggtgggccttctgtgttcttgttcccccccaaaccaaaagacactctgatgatatctagaacccctgaagtcacatgcgtggtggttgacgttagccaggaggaccccgaggtgcagtttaactggtacgtggatggcgttgaggttcataatgctaagacaaaaccgagggaagagcagttcaattctacatacagggtcgtttcagttctgaccgtgctacaccaggattggttaaatgggaaggagtacaaatgcaaggtgagcaacaaaggtttacccagctccatcgaaaagaccatttccaaggccaaggggcaacccagggagccacaagtatacactttgccccctagtcaagaagagatgactaagaatcaggtcagtctcacttgcctggtgaaggggttttacccctccgacattgccgtcgaatgggagagcaacggacagcccgagaacaactacaagactactccccccgtgctcgactctgatgggagcttcttcctttactcacggctgactgtggataagagccgctggcaggaagggaatgtcttctcctgcagcgtgatgcatgaggctctgcacaaccattatacccagaaaagtctgtccttgtcgctgggt

SEQ ID NO: 15761 - DNA, 1740 bp, synthetic construct
  misc_feature 1..1740: note = source = /note="Description of Artificial Sequence: Synthetic coding sequence"
  source 1..1740: mol_type = other DNA
atgaaatgggtaagttttatctcccttttgttcctcttcagctcagcttattccggttctttggacaaacgtcacggagagggaaccttcactagtgacgtgagctcctacctggaggagcaggccgccaaggaatttatcgcctggctggtcaagggaagaggccatggcgaaggaaccttcacatccgatgtgtcttcatacctggaggaacaggcagccaaggagttcattgcctggcttgtcaagggaaggggtcatggtgagggcactttcaccagtgacgtttcatcttacctggaggagcaagccgcaaaggagttcatagcctggctggtaaaaggcaggggacacggtgaaggcacattcacatccgatgtaagtagttaccttgaagagcaagccgccaaggagtttatcgcttggctggtcaagggccgtggccacggtgaaggaactttcacctcagacgtctcatcatacctggaggaacaggccgctaaagagttcatcgcctggctggtcaagggacgcggccacggtgaaggcacattcacatctgacgtgtcctcatacctggaggaacaggctgctaaggagtttattgcctggttggtcaagggtcgcggccacggtgagggtaccttcacttcagatgtcagcagttatttggaggaacaggctgcaaaagagtttattgcttggctcgtaaagggtaggggacacggcgaaggaactttcacatccgacgtcagctcctacctggaggagcaggctgcaaaggagttcattgcatggctcgttaaaggtaggggtcacggcgagggaacattcacttctgatgtaagcagttacctggaagagcaggccgccaaagagttcatcgcttggcttgttaaaggccgcggccacggagaaggtactttcacttcagacgtttcatcctacttggaggagcaggctgctaaggagttcatcgcatggcttgtgaagggaagaggtggaggaggtggaggcggcagcggcggaggcggctctggtggaggcggctctgccgagagcaagtacggaccaccctgccctccctgtcctgctccagaggctgccggaggaccatctgtttttctcttcccacctaaacctaaggacacacttatgatatcccgcacccccgaggtaacctgcgttgtcgtcgacgtctcacaggaggatccagaggtgcaattcaactggtacgtggatggagtggaggtacataacgccaagaccaagcccagagaagaacagtttaatagcacctaccgcgtagtcagcgtgctgactgtactgcaccaagactggctgaatggaaaggagtacaagtgtaaggtgtccaacaagggcctgccatcctccatcgaaaagaccatctctaaagccaaaggacaacccagggagccacaggtgtatactctgccccccagccaagaagagatgactaaaaaccaagtgtccctcacttgccttgtgaagggattttacccttctgacattgccgtagagtgggaatctaacggccagccagagaacaactacaaaaccacaccaccagttttggacagtgatggaagtttttttctgtattcacgcctgacagtggataaatcccgctggcaggaaggaaacgtcttctcttgctcagtaatgcatgaggctcttcataaccactatacccagaaatctttgtcactctcccttgga

SEQ ID NO: 15762 - DNA, 1740 bp, synthetic construct
  misc_feature 1..1740: note = source = /note="Description of Artificial Sequence: Synthetic coding sequence"
  source 1..1740: mol_type = other DNA
atgaagtgggtgtcgttcatttctctcttgtttctgttttcaagtgcctacagcggttccctggacaagcgtcatggagaagggacctttacaagcgacgtgagttcgtaccttgaggagcaggccgcgaaagaatttattgcttggctcgtgaaagggaggggacacggagagggaacattcaccagtgacgtaagtagttacctggaggaacaggcggcaaaggagttcattgcctggttggtcaaaggacgtggacacggtgagggcacctttacaagcgacgtctcttcatacttggaggagcaggccgctaaagagtttatcgcctggttggtgaaagggcgcggtcatggggaaggtacattcacatcagatgtttcttcgtacctagaagagcaagccgccaaggagtttattgcctggcttgtcaaagggcggggccacggagagggaacatttacatcagacgtgtcgtcctaccttgaagaacaagcggccaaggagtttattgcctggctagtgaagggtcgtggccacggagaggggacatttacttctgatgtaagcagttatctggaggaacaggccgccaaagaatttatcgcgtggctggtcaagggaagaggccacggggaaggaacatttacaagcgatgtctcatcctacctggaggagcaggccgcaaaagaatttattgcttggctcgttaagggccgtggacatggtgagggaaccttcacaagtgatgtgagctcctacttagaggaacaagcagccaaagagtttatcgcctggcttgtcaaaggacgggggcacggagagggcacatttaccagcgatgtgagctcttacctcgaggagcaggcagctaaagagttcatcgcctggctggtgaaagggaggggccacggggaggggaccttcacaagtgatgtctcgagttatctggaggagcaggccgctaaggaattcatcgcctggctagtaaaagggcgcggaggcggaggcgggggaggctccggcggtggagggtcggggggcggagggtctgctgagtccaagtatgggccgccttgtcccccatgtccagcacctgaggccgccggcggtccttccgtcttcctgttccctcccaaacccaaagatactctgatgattagcaggaccccagaggtgacttgtgttgtggtagatgtatcacaagaagaccctgaagttcaattcaactggtatgttgatggggtcgaggtgcacaacgcaaaaaccaaacctcgagaggaacagtttaactcaacctacagagtcgtcagcgtgctgactgtcctgcaccaagactggctgaacggaaaggagtacaagtgtaaagttagcaataagggacttccgagttccatagaaaagactatttctaaggcgaagggccagcctagggaaccacaggtgtatacattgccaccaagccaggaggagatgaccaaaaaccaagttagtctgacttgcctggtaaagggtttctacccaagtgatattgctgttgagtgggagtccaacggtcagccagagaataattacaaaaccactccccctgtactggactctgatgggtcattcttcttgtactctaggctgactgttgataagtctcggtggcaggaaggaaacgtgtttagttgcagtgtcatgcacgaggccctgcacaatcactatacccagaagtcactttcactgagcctcggg

SEQ ID NO: 15763 - DNA, 1740 bp, synthetic construct
  misc_feature 1..1740: note = source = /note="Description of Artificial Sequence: Synthetic coding sequence"
  source 1..1740: mol_type = other DNA
atgaaatgggtgagcttcatttctcttctgttcctcttcagctctgcttattctggctcactggataaaagacacggagagggtacatttaccagcgacgtgtcatcatatctggaggagcaagctgccaaggagtttattgcctggctggtcaagggccgaggccatggagaaggaactttcaccagtgacgtgtcgtcgtacctggaggagcaggcagcgaaagagttcatcgcttggttagtgaagggacgcgggcacggggaaggcacattcacctcagacgtgtcgagctacttggaagagcaggccgccaaagaattcatagcttggctggtgaaagggcgcggtcatggcgaaggcacctttactagcgatgtgtcttcctacctggaggagcaggccgccaaggagtttatcgcttggctggtaaaaggcaggggccacggcgaaggcacgttcaccagtgacgtgtcatcttatttggaggagcaggcagcgaaagagttcatcgcctggctagtgaaaggtcgcggtcatggtgagggaacattcactagcgacgtctcatcttatctcgaagagcaggccgcgaaagaattcatcgcctggctagttaagggcagaggccatggcgagggcacattcacctccgacgtatcatcatatttggaagagcaagcagcgaaagagttcattgcttggctggtcaaagggcgcggtcacggcgaggggactttcacaagcgatgtctcgtcatacttggaggagcaggccgccaaagagttcatcgcctggcttgtgaaaggccgggggcatggggagggcacatttactagcgacgtgagttcctacctcgaggaacaggcagcaaaggaattcatagcttggcttgtcaagggaaggggtcatggcgaggggactttcacttcggatgttagttcgtacctggaagaacaggctgctaaggaattcattgcttggcttgtgaagggacggggcgggggtggcggcggtggaagcggaggtggcggatccggtggggggggcagcgcggaaagcaaatatggtcctccctgccctccctgccctgcaccggaagctgccggaggcccaagcgtatttcttttcccacccaaaccgaaggacactctgatgattagcagaactcctgaagtgacatgcgtggtggtggacgtctctcaggaggatccagaggttcagttcaactggtatgtagatggcgtggaggtacacaacgcaaagacgaagccgcgcgaggagcagttcaacagcacctaccgggtggtctccgtcctcactgttctgcatcaggactggttgaacggtaaggaatataagtgcaaagtctccaacaagggtttgcccagttccatcgagaaaaccatcagcaaggcaaaggggcagcctagggaaccccaggtgtacaccctccctccaagccaagaggaaatgaccaagaaccaagtgagccttacttgcctggtcaaagggttttacccctcggacatcgctgtggagtgggaatctaatggtcagcccgaaaataattacaagaccactccacccgtcctggattcagacggatccttcttcctctactctcgactgaccgtggacaagtctcggtggcaagaggggaacgtgttctcttgctctgtaatgcacgaagcattgcataatcattacacacagaagtctctgagtctgagtttggga

SEQ ID NO: 15764 - DNA, 1740 bp, synthetic construct
  misc_feature 1..1740: note = source = /note="Description of Artificial Sequence: Synthetic coding sequence"
  source 1..1740: mol_type = other DNA
atgaagtgggtgtccttcatctcgttgctgtttttgttttcctccgcatacagcggttccttggataaacgccacggggagggtacttttacgtcggacgtgtcgtcataccttgaagaacaagctgcgaaggaattcatcgcctggctggtgaaaggaagaggtcatggtgaaggtacctttacctcggacgtgtcatcttaccttgaggaacaagcggcgaaggagtttatagcatggttggtcaaggggcgtggacatggcgaaggaacttttacttcggacgtcagctcctatctcgaagaacaagctgcaaaggagttcatcgcgtggctcgttaagggtaggggtcatggagagggaacttttacctcggatgtctcgtcatacctcgaggaacaggcagcaaaggaattcatagcatggctggttaagggacgcggacacggggagggaacctttaccagcgacgtgtcctcatatctggaagagcaggccgcaaaagagtttatcgcatggttggtgaaagggcgcggtcatggggagggaacgttcacctcagacgtgagctcctatctggaagagcaggctgccaaggagtttatcgcgtggctggttaagggccggggacacggcgaaggaacctttacgtcggacgtttccagctacttggaagaacaggctgcaaaagagtttatcgcatggctcgtcaagggtcgggggcatggagagggcaccttcacgtctgatgtgtcctcataccttgaggagcaggcagctaaggagttcatagcctggctggttaaaggtaggggtcatggcgaagggacttttacctcagacgtctcttcgtacctcgaagagcaggcggcaaaggagttcatagcgtggctggtcaaaggtcgaggacacggcgaaggtactttcacttctgatgtctcgtcgtacctcgaagagcaggcagcaaaagaattcatcgcatggcttgtgaagggtcgtgggggaggtggcggcggaggctcagggggaggaggatcgggaggaggaggatccgcagaatcaaagtacgggccaccatgtcctccttgccctgcccccgaggccgcgggcgggccttccgtgttcctgtttccgcccaaacctaaagatacccttatgatttcgagaaccccagaagtgacttgtgtggtggtggatgtgtcccaggaagatcccgaagtccagtttaactggtatgtcgatggtgtggaagtccataatgccaagaccaagcctcgggaagaacaattcaactctacctaccgggtggtgtccgttcttaccgtgctgcaccaagattggcttaatggaaaggaatacaagtgtaaggtgtcaaacaagggtctgccatcctcaattgaaaagaccatttcgaaggccaaaggacagccaagagaaccgcaagtgtacaccctgccgccctcgcaagaagaaatgactaagaatcaagtgtcactgacttgcttggtcaaaggcttttaccctagcgacattgcagtggaatgggaatcgaacggccaacccgagaataactacaagactactcctccagtgcttgattccgatggttcgttttttctttactcaagactcactgtggataagtccagatggcaagaaggtaacgtcttttcgtgttctgtgatgcacgaagcccttcataatcattacactcaaaagagcctgagcctgtcccttgga

SEQ ID NO: 15765 - DNA, 1740 bp, synthetic construct
  misc_feature 1..1740: note = source = /note="Description of Artificial Sequence: Synthetic coding sequence"
  source 1..1740: mol_type = other DNA
atgaagtgggtgtccttcattagccttctgtttcttttttcctcggcatactcaggcagcttggacaaacggcatggagaaggcacctttacctcggatgtgtcctcataccttgaggaacaagcggccaaagagttcatcgcttggctggtcaaaggacgagggcatggtgaaggcacttttacttccgacgtctcatcgtaccttgaagaacaggcagcaaaagagtttatagcctggttggttaaaggtagaggacacggtgagggtacgtttacgagcgatgtctcctcctacctggaggagcaagctgctaaggaattcattgcatggctcgtgaaggggcgcggccatggagaaggtacctttacctcagatgtctcatcatacttggaagagcaagcggctaaggagtttatcgcctggctcgtgaaaggtcgaggacatggtgaaggaacttttacctcggacgtgtcctcgtatctggaggagcaggcagccaaagaattcatagcatggctcgttaagggaagagggcacggtgaaggaacctttacgtcagacgtgtccagttaccttgaagagcaggccgcaaaagaattcattgcctggctggttaaggggagaggacatggagaggggactttcacctcggatgttagctcgtatctcgaagagcaggcagctaaagagtttattgcgtggttggtcaagggtcgcggacacggggagggcaccttcaccagtgatgtgagcagctacctcgaagaacaagccgcaaaggagttcatcgcgtggcttgtcaaaggtaggggtcatggcgaggggacgttcaccagcgacgtatcgagttacttggaggaacaggctgccaaggagttcattgcttggctggtgaaaggaagaggccacggtgagggaacttttactagcgacgtgtcgtcctatcttgaagaacaagcagcgaaggaattcatcgcatggctggttaaaggaaggggtggaggaggtggaggaggaagcggcggcggcggctccggaggaggtgggtcggccgaatcgaagtacggtccaccttgtcctccctgccccgcacctgaagccgcaggtgggccatccgtgtttctttttccaccgaagcctaaggacactctgatgatcagcagaaccccggaagtcacgtgtgtggtggtggatgtgagccaagaagatcctgaggtgcaattcaactggtacgtggacggcgtggaggtacacaacgcaaagactaagccacgggaagaacaattcaattcgacttaccgtgtcgtctcagtgcttaccgtgctccatcaagattggcttaacgggaaggaatacaagtgtaaggtttcaaacaagggactcccctcgtccattgaaaagaccatctcaaaggcaaagggacaaccacgtgagcctcaggtctacacccttccacccagccaggaagaaatgactaagaaccaggtgtcgctcacctgtctcgtcaagggcttttatccttcggacattgccgtggaatgggagagcaatgggcaacccgagaacaattacaagactacccctccagtgctcgattcagatggaagtttctttctctactcccgcctgactgtcgataaaagccggtggcaggaaggaaacgtcttttcatgctctgtgatgcatgaggcactgcataatcactacacgcaaaagagcctgtccctgtcccttggc

SEQ ID NO: 15766 - DNA, 1740 bp, synthetic construct
  misc_feature 1..1740: note = source = /note="Description of Artificial Sequence: Synthetic coding sequence"
  source 1..1740: mol_type = other DNA
atgaaatgggtttctttcatttcacttctatttctgtttagtagcgcctattcaggttcgcttgataaaagacatggagaggggacgtttacgtccgatgttagttcatacctcgaagaacaagctgcaaaggaattcattgcctggcttgtcaaaggacgaggacatggagagggaacgttcacgtcagacgtttcatcatatctcgaagaacaagctgctaaagaattcatagcatggctggttaaaggcagaggccatggcgagggaacgtttacgtcagatgtttcatcgtacctggaagaacaagcagccaaagaattcattgcctggttggtgaaagggaggggacatggagagggaactttcactagtgatgttagtagctacctagaagagcaggcagcgaaagaattcattgcgtggcttgtaaaaggtcgagggcatggagaaggtactttcacttctgatgtttcgtcttacttggaagagcaagcggccaaggagttcatcgcctggttggttaagggacgaggacatggagaaggaacgtttactagcgatgtttcatcttaccttgaagaacaagcagcaaaagagtttattgcttggcttgttaagggcagaggacatggggaaggaacattcacgagtgatgtgtcaagctacctcgaggagcaggccgccaaggagtttatcgcttggttggttaaaggtcgcggacatggtgaaggaacattcacctcagatgtttcgtcgtatttggaagaacaagccgctaaagagttcattgcctggctggtcaaagggagaggacacggcgagggtacatttaccagtgatgtatcgtcgtaccttgaagaacaagctgcaaaggagtttattgcgtggttggttaaaggtcgaggtcatggagaaggaacctttacgtctgatgtttcatcttatcttgaagaacaagctgcgaaagaatttatagcgtggttggtcaaagggcggggaggtggaggaggaggaggctcaggaggtggtggaagcggaggaggaggatccgctgagtccaaatatggtcctccatgccccccgtgcccagcaccagaagcagcggggggcccatcagtgttcctgtttccacctaaaccaaaagatactcttatgatatcaagaactccggaggtcacttgcgtagtggtagatgtatcacaagaagatcctgaggttcagtttaattggtatgttgacggtgtcgaagttcacaacgcaaaaaccaagccacgtgaggaacaatttaatagtacttatcgcgtcgtttctgttcttacagtcctacatcaggattggctaaacggcaaagagtataaatgtaaagtttccaacaaaggattgccatcatcgatagagaagacaatcagtaaggccaagggccaacctcgggaacctcaggtgtacacgcttcctccatcgcaagaggaaatgaccaaaaatcaagtctcgttgacgtgtcttgtgaagggattctacccgtcggacattgctgtagagtgggagtcaaatggccaaccggaaaataactacaagactaccccgcctgtactcgattcagatggttcgttcttcctgtattcaagactcaccgtggacaaatcccggtggcaagagggcaatgtcttcagttgttccgtgatgcatgaagcactccataatcattacactcaaaaatccttatcgcttagtttggga

SEQ ID NO: 15767 - DNA, 1740 bp, synthetic construct
  misc_feature 1..1740: note = source = /note="Description of Artificial Sequence: Synthetic coding sequence"
  source 1..1740: mol_type = other DNA
atgaagtgggtttcctttatctcactcttgttcctgttttcctcagcctacagcggatctctggacaagagacacggtgaaggcacatttacgagtgatgtcagcagctatctggaggaacaggccgctaaagaattcatcgcgtggttggtgaaaggtcgcgggcatggggagggtacctttacaagcgacgtgtcttcttatttggaggagcaggcagcgaaagagttcatcgcctggctggtaaagggtcggggacatggcgaggggacctttaccagcgatgtcagttcttacttggaggagcaggcggctaaggagttcatcgcctggctggttaaagggaggggccacggcgagggcacatttactagcgatgtgagctcttacttggaagagcaggctgcgaaggagtttatcgcatggctggtcaaaggcagaggccatggcgagggcaccttcacctcagatgtgtcttcatacctggaagaacaggccgctaaagaatttatcgcttggctcgtgaagggcaggggacatggtgaagggacatttacttccgacgtgtccagctatcttgaggaacaggcagccaaagaatttatcgcctggctggtgaaagggcgaggccatggggaagggacattcacgagcgatgtttcttcttacctggaagagcaagctgcgaaggagtttatcgcatggctcgtcaagggtcggggtcatggagaaggcaccttcactagcgacgtgagtagttatttggaagagcaggcagctaaagagttcatcgcttggctggtaaagggccgggggcacggcgagggcactttcacttctgacgtgtcatcatacctggaggagcaggcagccaaggaattcattgcttggctggttaagggaagagggcatggagaagggaccttcacctctgatgtgagttcttacctggaagagcaggcagcaaaggaattcatagcgtggctggtgaagggtagaggaggaggtggggggggtgggagcggagggggcggttcagggggcgggggctcagcagagtccaaatacgggccaccctgcccaccctgtcccgctcctgaggcagctggcgggccctccgtgtttctcttccccccgaagcccaaagatacactgatgatcagccggacaccagaagtgacttgcgttgtggtcgatgtatctcaggaggatccagaagttcagtttaactggtacgtggacggagtcgaggtccacaacgcaaagacaaagcctagagaagagcaatttaattccacctatcgcgtcgtgtctgtgctcaccgttctgcatcaagattggctcaatggcaaagagtataaatgcaaggtgagcaataaagggcttcctagctctatcgagaagactatatccaaagcaaaggggcagccaagggagccccaggtgtatactctccccccgtcacaggaggagatgacaaaaaaccaggtaagtctgacttgtctggtgaagggtttttacccgagcgacatagccgtggagtgggaaagcaatggccagccagaaaacaattataagactacaccacctgtattggatagcgacggatcattcttcctgtacagtcgactgactgtcgataaatccagatggcaggaaggcaatgtgtttagttgtagcgtaatgcacgaggctcttcataaccactacacacagaagtctctgagcctgagtctcgga

SEQ ID NO: 15768 - DNA, 1740 bp, synthetic construct
  misc_feature 1..1740: note = source = /note="Description of Artificial Sequence: Synthetic coding sequence"
  source 1..1740: mol_type = other DNA
atgaagtgggtgagcttcatctcgctgctgtttctgttctcgagcgcctactccggatccctggataagcgccatggtgaagggaccttcacgagcgatgtatcatcatacctcgaggaacaggccgcaaaagaattcatagcatggcttgtgaaaggccgcggtcacggcgaaggcacttttacctcggacgtatcatcctacttggaggaacaagcagctaaggagttcatcgcttggctcgttaagggtagaggacatggcgaggggactttcacttcggacgtgagcagctacctggaggaacaggctgccaaggagtttattgcttggcttgtcaaagggcgggggcatggcgaaggcacctttacctctgatgtctcgagctatttggaggagcaggcggcgaaagagtttattgcctggctcgtgaaggggcgcggacacggcgaaggaacctttacctcagacgtgtcgtcgtatctggaagaacaggccgctaaagagttcatcgcgtggctggtcaagggacgtggccacggggaagggactttcacctcagatgtgagtagttacctggaagagcaggccgcgaaggaattcatcgcatggctggtaaagggccgaggacatggagaaggtacgtttaccagcgacgtttcctcgtatcttgaggagcaagccgctaaggaattcattgcatggttggttaagggacggggtcacggtgagggaactttcacttccgacgtgtcatcataccttgaggaacaggcagccaaggagttcattgcgtggctggtgaaaggtcgcggtcacggagaaggaaccttcaccagcgatgtgagtagctacttggaagaacaagcggccaaagagtttatcgcgtggttggtcaagggccggggacacggggagggaaccttcacttcagatgtcagcagctacctcgaggagcaggccgccaaagaattcatcgcctggctggtcaaaggaagagggggaggcggaggaggagggtccggaggaggcggctcaggtggagggggatcggccgaaagcaagtacggtccgccgtgtcctccgtgcccggcgcccgaggctgcaggaggcccgtctgtgtttctgttccctcctaagccaaaggacaccctgatgatctcgaggactcctgaagtgacgtgtgtcgttgtggacgtgagccaggaagatccagaagttcagttcaattggtacgtggacggtgtggaagtgcataacgcaaagaccaagccacgcgaagaacagttcaacagcacctaccgggtggtgtccgtgctcactgtccttcaccaggactggctcaatggaaaagagtacaagtgcaaggtgtcgaataaaggactcccctcctccatcgagaaaaccatctcgaaggccaagggccaaccgcgggagcctcaggtctacacgctcccaccgtcacaggaagaaatgactaaaaaccaagtgtccctgacctgcctggtcaaaggcttttacccgtcggacatcgcggtggagtgggaatcaaacggacaaccagagaacaactacaagactactcccccagtgctggactccgacggatccttcttcctgtactccagactcacggtggataagtcccgctggcaggaggggaatgtgttctcgtgctctgtgatgcacgaggcgcttcacaaccattacactcaaaagtcgttgtccctgtccctcggg

SEQ ID NO: 15769 - DNA, 1740 bp, synthetic construct
  misc_feature 1..1740: note = source = /note="Description of Artificial Sequence: Synthetic coding sequence"
  source 1..1740: mol_type = other DNA
atgaagtgggtcagcttcatctcgctcttgtttctgttctcaagcgcatactcaggatccctggacaaaagacatggggaagggacctttacgtcagacgtttcatcataccttgaggaacaggcggcaaaggagtttatcgcctggttggtcaagggcaggggacatggcgagggcaccttcacttccgatgtgagctcgtacctcgaggaacaggcagccaaggagttcatcgcatggctcgtcaagggtcgcggacacggcgaaggaaccttcacgtccgacgtgagctcatatttggaagaacaagccgcaaaggaattcatcgcatggctcgtgaaggggcggggacacggagaaggaaccttcacctcagacgtttcctcatacttggaagagcaggccgcgaaagagtttatcgcatggctggtgaaaggacggggacacggagaaggaacctttactagcgatgtctcatcttatctggaagaacaggccgccaaggagttcatcgcgtggcttgtcaagggtcgaggacatggagaaggtacctttacctccgatgtctcctcctacctcgaagaacaggcagcaaaagaattcatcgcctggctcgtgaagggaaggggacatggagaaggaacctttacctcggatgtgtctagctacctcgaggagcaggccgccaaggagtttatagcctggctggttaaaggccgcggacacggggaaggaaccttcacgtccgatgtctcaagctatctggaggagcaagcggcaaaggagtttatcgcttggcttgtcaagggccggggtcacggtgagggaactttcacttccgatgtgagctcctacttggaggagcaagccgctaaggagttcatcgcatggctggtgaagggccggggacatggcgaaggcactttcacctccgacgtcagctcctaccttgaggagcaagcggccaaggagttcatcgcctggctggtgaaaggacgcggaggaggcggagggggcggatccggtggcgggggctcaggtggtggaggaagcgcagagtcgaagtacggacccccatgtccaccgtgcccggctccggaagcggcgggaggaccatcggtgttcttgttcccgccgaaaccgaaagacactctcatgatttcgagaaccccagaggtgacttgcgtggtggtcgacgtttcacaagaggacccggaagtgcagttcaattggtatgtggacggggtggaagtgcacaacgcgaaaactaagccacgcgaagagcaattcaactccacgtatcgcgttgtgtccgtcctgactgtcctccaccaagactggctcaatgggaaagaatacaagtgcaaggtgtccaataagggactgccgtccagcatcgaaaagactatctcgaaggccaagggccagcctcgggaaccgcaggtgtacacgctgcctccatcgcaggaggaaatgacgaagaaccaagtgagcctgacttgcctggtcaaaggattctacccttcggacatcgcggtggagtgggaatccaacggccaaccggagaataactacaagactacccctccggtcctggactccgacggatcgttttttctctacagccgcctcaccgtcgataagagcagatggcaagagggtaacgtgttctcctgcagcgtgatgcatgaggccctgcacaaccactacacccaaaagtcgctgtcgctttccctggga

SEQ ID NO: 15770 - DNA, 1740 bp, synthetic construct
  misc_feature 1..1740: note = source = /note="Description of Artificial Sequence: Synthetic coding sequence"
  source 1..1740: mol_type = other DNA
atgaaatgggtgagcttcatcagcctgttgttcctcttctccagcgcgtattcgggatcactcgataaacggcatggagaaggaacgttcacctcggacgtctcttcataccttgaggagcaggccgcgaaagaattcatcgcgtggctcgtcaagggacgcgggcacggcgaaggaacctttacttccgacgtatcctcgtacctggaagaacaggccgccaaagagtttattgcctggctggtgaagggacgcggacatggtgagggcacgtttacctcggacgtaagctcctacctcgaagaacaagcggctaaagagttcatcgcatggctggttaaaggaagaggccacggcgaagggacttttacttccgatgtctcgtcttacttggaggaacaagcagctaaggagtttatagcatggttggtaaaggggcgcggacatggcgaaggcactttcactagcgacgtttcatcctacctggaggagcaggctgccaaggagtttatcgcgtggctggtcaagggtagaggccatggcgagggtaccttcacctcggatgtgtcgtcatatcttgaagaacaggctgcaaaagagtttatcgcctggcttgtgaagggacggggacacggagaagggactttcaccagtgatgtgtcgagttaccttgaggaacaggcggccaaagaattcattgcatggctcgtgaagggtcgggggcatggggagggcacctttaccagcgacgtctctagctaccttgaagaacaagctgctaaggagttcatcgcttggttggtgaagggtcgcggacacggagagggaactttcacgtctgacgttagctcctatttggaagagcaggcagcaaaggaattcattgcctggcttgtcaagggccgtggtcacggtgagggaaccttcacttcagatgtgtcaagctacctggaagagcaagccgcgaaggaattcatcgcctggttggtcaaaggtcgcggaggaggcggaggtggaggtagcggcggaggagggagcgggggcggcggatcagccgaatccaagtacggtccaccgtgcccaccttgcccggctcctgaggcggccggcggaccctcggtctttctcttccctccgaagccaaaggacactctgatgatctcccgcactccggaagtcacctgtgtggtcgtcgatgtgagccaagaggacccggaggtgcagttcaactggtacgtcgacggggtggaggtgcacaatgcaaagaccaaaccaagagaagaacagttcaacagcacttaccgggtggtgtcggtgctcactgtgctgcatcaggactggttgaatggaaaagagtacaagtgcaaggtgtccaacaaggggctgccgtcctccatcgaaaagaccatctcgaaggcgaagggacaaccgcgggagccacaggtgtacacgttgcctccctcccaggaagagatgaccaaaaatcaagtgtccctgacgtgtctggtgaagggcttttacccgtccgacatcgccgtggaatgggagtcgaacggtcaaccagagaacaactacaagaccacgcccccggtgctggacagcgatgggtcgttcttcctttactcaaggctgaccgtggataagtctaggtggcaggaaggcaacgttttctcgtgcagtgtcatgcacgaagccctgcacaatcactacactcagaagtcgctgtccctctcactggga

SEQ ID NO: 15771 - DNA, 1740 bp, synthetic construct
  misc_feature 1..1740: note = source = /note="Description of Artificial Sequence: Synthetic coding sequence"
  source 1..1740: mol_type = other DNA
atgaagtgggtgtctttcatttcactactgttcctgtttagctccgcctactctggatcacttgacaagcgacacggcgagggtactttcacgagtgacgtgtccagctacctcgaggaacaggctgccaaagaatttattgcgtggctcgtgaaaggccgtgggcacggggaaggaacctttaccagtgatgtttcgagttatctggaggagcaggctgcaaaagaatttatcgcttggttggtcaaagggcgaggacatggagaaggcaccttcacatccgacgtgtcctcatatttggaggaacaggctgcaaaggaattcatcgcctggttagtcaaaggtagagggcatggggagggcacgtttacgtcggatgtgtcttcctatctcgaagagcaggctgcaaaagagttcatcgcttggctagtcaaaggcagggggcatggggaggggacatttacaagtgacgtgtcttcatatcttgaggaacaggcagccaaagagttcatagcttggttggtcaaagggcgaggccatggtgaaggcacatttacttccgacgtgtctagttacctagaggaacaggccgccaaagaattcatcgcctggctcgtgaaagggcgtggccatggggaagggacctttacctctgatgtctccagctacctcgaggagcaggcagctaaagagtttatagcttggctggtgaaagggcgcggccatggcgaaggaaccttcacttccgatgtctcctcttatcttgaggaacaggctgcaaaagaattcattgcgtggttggtcaaggggcgcggccatggagaggggacattcacctcagacgtgtcgtcttatctcgaggaacaagcggctaaagaatttatagcctggctcgtgaagggcagggggcacggagagggaacctttacatcggacgtgtctagctatctggaggagcaagcagccaaggaattcatcgcctggctagtgaaggggaggggaggcggaggaggaggagggtccggaggcggaggaagtggcggcggcggctccgctgaaagcaaatatgggcccccctgcccaccctgccccgcacctgaagccgcgggcggtccttctgtgtttctgtttcccccgaagcccaaagataccctaatgatttccaggacccccgaggtgacttgtgtagtcgtggacgtaagccaggaggaccctgaagtgcagttcaactggtacgtggatggcgtagaagttcataatgccaagacaaaacctcgagaagagcaattcaacagcacgtaccgggtcgtctcagttttaacagttctgcaccaggattggctcaatggtaaagaatacaaatgtaaggttagtaacaaaggcctgccatcgtctatcgagaaaactatcagtaaggctaaggggcagcctcgagagccccaagtttatactcttcctcctagccaggaggaaatgactaagaaccaagtctccctgacgtgtctcgttaaggggttttacccatcagatatagccgtggagtgggagagtaacggtcagccggagaataactataaaactactccccctgtgctcgactctgatggttctttcttcctctattctaggctgacagtagacaaaagtcgatggcaggaaggtaatgtgttttcttgcagcgtgatgcacgaagccctccacaaccattatacacagaaatctctatctttgagcctggga

SEQ ID NO: 15772 - DNA, 1740 bp, synthetic construct
  misc_feature 1..1740: note = source = /note="Description of Artificial Sequence: Synthetic coding sequence"
  source 1..1740: mol_type = other DNA
atgaaatgggtgtctttcataagcctgttgtttctgttctcttctgcgtattctggatctctcgacaaacgacatggtgagggaacatttaccagtgacgtctcgagttatctcgaagagcaggccgcaaaagagtttatagcttggcttgtaaaggggcgcggccacggcgaggggaccttcaccagcgatgtctccagttacctggaggagcaggcagcgaaggagttcattgcttggttggtgaaaggccggggccatggtgaagggactttcacctccgacgttagctcttatttggaagagcaggccgccaaggagttcatcgcttggcttgtcaaaggccgggggcatggcgaggggaccttcacctccgatgtctccagctacctagaagagcaggcagctaaagagttcatagcctggctggtcaaggggcggggccacggcgagggcacatttacgagtgatgtcagtagttatctggaggagcaggctgctaaagagttcatcgcatggctggtgaaaggcagaggacacggtgagggaaccttcacctctgatgtaagctcgtatctggaagagcaggccgcaaaagaatttatagcatggctcgtcaaaggccgcggtcatggcgaagggaccttcacatcggatgtatcctcctatttagaggaacaagccgccaaggagtttattgcatggttggtcaagggacgcgggcacggcgaaggcacctttaccagcgatgtgtccagctaccttgaagaacaggctgcgaaagagttcatcgcatggctcgtgaagggtcgggggcacggagagggtacatttacttcagatgttagctcctacctagaggagcaagcagctaaggaatttatcgcttggctcgtgaagggccgagggcacggggaaggtacctttaccagtgacgtgtcatcctacctcgaagaacaggcggctaaggagtttatcgcatggctagtgaaaggacgaggaggagggggcggcggtggatcgggtggcggtgggagtggcggcggtggcagcgccgagagtaaatatggacctccctgtccaccctgtccagcccccgaagcagctggcggcccaagcgtgttcctgtttccccctaaaccgaaagatactctgatgatttcccgcacccccgaggtgacatgcgtcgtggtggatgtcagtcaggaagaccctgaggtgcagttcaattggtatgtagatggggtggaagtgcataacgctaagacgaagcctagagaggaacagttcaattccacctaccgtgtggtgtccgtgttaaccgtgcttcaccaggattggctcaatggtaaggagtacaagtgcaaggtctccaataagggattgccaagcagcatcgagaaaacaatcagtaaggccaaaggacagccaagagagccacaggtctatacgttgcccccctctcaggaggagatgacaaagaaccaggtttccttgacgtgtctggtgaagggcttttacccatcggacattgctgtggagtgggagagcaatggacagcctgaaaacaattacaaaacaaccccgcccgtcctcgactccgacggctcttttttcctgtactcacgcctcaccgtcgataagagccgatggcaggagggtaatgtattttcctgctctgtaatgcatgaggctttgcataaccactatacccagaaatccctctctctgagtctgggg

SEQ ID NO: 15773 - DNA, 1740 bp, synthetic construct
  misc_feature 1..1740: note = source = /note="Description of Artificial Sequence: Synthetic coding sequence"
  source 1..1740: mol_type = other DNA
atgaagtgggttagcttcatatcactcctgtttctcttttcttctgcgtacagtggcagcctagataaacgccatggggaggggacctttaccagcgatgtgagctcctatctggaggagcaggctgcaaaggagtttatcgcgtggttggttaaagggcgtggtcacggagagggaacctttacgtccgacgtatcttcctatctagaggaacaggctgcgaaggaattcattgcctggctggtcaaggggcgagggcatggcgaagggaccttcacctccgatgtatcctcatacctggaagagcaggcggccaaagagtttatcgcctggctcgtgaagggtaggggtcatggagagggtacattcactagtgatgtgtccagctacttagaggagcaagcagcaaaggaattcattgcttggttagtaaaagggcgcgggcatggagagggaaccttcacaagtgatgtttcttcttatctcgaggagcaagcggccaaggagttcatcgcatggttggttaaagggagaggccacggggagggaacttttaccagtgacgtaagctcctacctcgaagaacaggctgcaaaagaattcatcgcgtggctagtgaaaggtagagggcacggggaaggcacattcacttccgatgtgtcaagctacctggaagagcaggctgctaaggaattcatcgcatggctcgtgaaaggccgaggccacggtgagggaacgttcacctcagatgtgagttcctacctggaagagcaggccgccaaggagttcattgcctggctcgtcaaaggacgcgggcacggggaaggcacatttacgtccgacgtatccagctatctcgaggagcaggcggcgaaagagttcatcgcatggctcgtgaaaggccgggggcacggagagggaaccttcacctccgatgtgtcatcgtatctggaggagcaagccgctaaggagtttatagcatggctagttaaaggccgtggaggtggcggcggagggggttccggtggcggagggtcaggtggcggagggagtgcggaaagcaagtatggaccgccctgtccaccttgtcctgcccctgaggcagcaggaggcccttcggtgtttctgtttccccctaaacccaaagacacactgatgatatctaggactcctgaagtgacatgcgttgtggttgacgtatcgcaggaagatcccgaggtccagttcaattggtatgttgacggcgtcgaggtgcataacgcaaagactaaacctcgagaggagcaattcaactctacataccgcgtcgtatcagttctgaccgtgcttcatcaggattggcttaatggcaaggagtacaagtgcaaggtctctaacaaagggttgccttcatctattgagaagacgattagcaaagccaagggccaacctcgggaaccacaggtgtacacactcccgcctagccaagaagagatgacaaaaaaccaagtctccttaacttgcttggtgaagggattttacccttctgatatagcagttgagtgggaatcaaatggacagccagagaataattacaagaccacaccgcccgtattggacagcgacggttcgttctttctttactcccgcctcaccgtagataaatccaggtggcaggagggtaatgttttcagctgtagtgttatgcacgaagctctgcacaaccactatacccaaaagtccttgtccttgtccctgggg

SEQ ID NO: 15774 - DNA, 1740 bp, synthetic construct
  misc_feature 1..1740: note = source = /note="Description of Artificial Sequence: Synthetic coding sequence"
  source 1..1740: mol_type = other DNA
atgaagtgggtgtccttcattagcctgctgtttctgtttagctccgcttacagcgggagccttgacaagcgtcatggggaagggacctttacttccgacgtgagttcatacctggaggaacaagccgccaaggaattcattgcctggttggtcaaagggcggggccacggggagggcacctttacgagcgatgtttctagctatttggaagaacaggcggccaaggaattcatcgcctggttagtgaagggcaggggtcacggagaaggcaccttcacttcggatgtgtcctcttatttggaagaacaggcagcgaaggaatttatcgcctggctcgtgaaaggaaggggacacggtgaaggtacctttactagtgacgtatcatcctacctggaggaacaggctgctaaggagtttattgcctggctagttaaagggcgaggacatggtgagggaacttttacttcagacgtctctagctaccttgaagagcaagctgcaaaggagttcattgcctggctggtaaaaggacgaggtcatggtgaaggtaccttcaccagcgacgtaagttcatacctcgaagaacaggccgccaaggaatttatcgcttggctggtgaagggcagaggacacggcgaaggcacttttacgtctgatgtgagctcatacctggaggaacaggccgctaaggagttcatcgcctggctcgttaagggcagaggccatggggagggcacatttacgtccgatgtgtcatcttatctggaggaacaggctgccaaggaatttatagcgtggcttgtgaaagggagaggtcatggggaagggactttcacaagtgatgtgagtagttacctggaggagcaggcggcaaaagaattcatcgcgtggctggtgaagggacgaggccatggcgagggcacatttacatcagatgtgagtagttacctggaagagcaggccgccaaagaattcatagcttggctggtgaaaggtaggggcggcggcggtggggggggtagtggtggaggggggtctgggggaggaggaagcgctgaaagtaaatacgggccaccttgccccccatgcccggctccggaggccgccggaggtccaagtgtgtttctatttccaccaaagcccaaagataccctgatgatatcccgaaccccagaagttacgtgtgtggtggtcgacgttagccaggaagatcctgaggttcagttcaactggtacgtggatggagttgaggtgcacaatgcgaagactaaaccacgagaagagcagtttaattcgacatacagggtcgtgtctgttcttacagtgcttcaccaggattggctgaacgggaaggaatataaatgtaaagtcagtaacaaaggactgccatctagcatagaaaaaaccattagcaaggctaagggacagcctagagagccccaggtgtatacgttgcccccctcccaggaggaaatgacaaagaaccaggtaagtttgacctgcctagtgaaggggttctatccttccgacattgcggtggaatgggaatcaaacggccagcctgaaaacaattataagactactcctccagtactggatagtgacggatctttttttctgtattcccgacttactgtagacaaatccagatggcaagagggaaatgtattttcatgcagtgtcatgcacgaagccctccataatcactatacccaaaagagtctctccctaagtctcgga

SEQ ID NO: 15775 - DNA, 1740 bp, synthetic construct
  misc_feature 1..1740: note = source = /note="Description of Artificial Sequence: Synthetic coding sequence"
  source 1..1740: mol_type = other DNA
atgaagtgggtgagctttatctctcttctttttctcttctcctcagcttactcgggatcgctggacaaaagacatggggaaggtacctttactagcgatgtgtccagctacctggaagaacaggcggccaaggaattcattgcgtggttggtaaagggtcggggtcacggcgaagggacgtttaccagcgacgtcagctcttacttggaggaacaagcagctaaggagtttatcgcctggctcgtaaagggaagaggccatggcgagggtacctttaccagcgatgtttcatcctaccttgaagagcaggcggctaaggaattcatcgcttggttggttaaaggccggggtcatggagaaggtacgtttacctccgacgtgtcgtcgtatctggaagagcaagcagcgaaagagttcattgcctggctggtgaaagggcgtgggcacggtgaaggcaccttcacttccgacgtaagcagctacctcgaagagcaggccgcaaaagagtttattgcatggcttgtcaagggacggggtcacggagaaggcactttcacctccgacgtctcgtcatacctcgaagaacaagcagcaaaggagtttatagcgtggctggtcaagggccgcgggcatggagaaggaacgttcacctcggatgtttcctcatacctcgaggagcaggccgcgaaggagttcatcgcctggcttgtgaaaggacgagggcatggcgaagggacctttacgagtgacgtctcctcctatctcgaagagcaagctgccaaggagtttattgcgtggcttgttaaaggacgcggtcacggtgaaggaactttcacgtctgatgtgtcctcataccttgaggaacaggcagcaaaagaattcatagcgtggttggttaagggccgggggcatggtgaggggacctttacctctgacgtttcctcatatctcgaggagcaagccgccaaagagtttatagcatggctcgtgaagggaagaggtggtggcggcggaggtgggagcggaggtggtggtagcggtggaggaggttcagcagaaagcaaatacggacctccctgtcctccatgcccagcacctgaagccgcaggcggaccgagcgtgtttctgtttccgcctaagcctaaagatactcttatgatctcgagaacccccgaagtgacgtgcgtggtggtggatgtctctcaagaagatcccgaagtccagtttaactggtacgtggacggggtcgaagtgcacaatgcaaagactaagccaagagaagagcagtttaactcgacctaccgtgtggtgtcggtgcttaccgtgctccatcaagattggttgaacggaaaggaatacaagtgtaaggtgtcaaataagggcttgccaagctccattgagaaaaccatttccaaggctaagggacaacctagagaaccccaggtgtacaccctgccaccgtcgcaggaagaaatgactaaaaaccaagtgtcgcttacttgtctggtgaaggggttctacccttcggatattgcagtcgagtgggagtccaacggacaacctgagaacaattacaaaactactccacccgtccttgattcggacggatcgttttttctgtactcacgacttactgtggataagtcaaggtggcaggaaggaaatgtgttcagctgttcggtcatgcatgaggcactgcacaaccattacactcagaaatcactgagcctgtccttggga

SEQ ID NO: 15776 - DNA, 1740 bp, synthetic construct
  misc_feature 1..1740: note = source = /note="Description of Artificial Sequence: Synthetic coding sequence"
  source 1..1740: mol_type = other DNA
atgaagtgggtttcatttatcagtctgctttttttgttttctagtgcctactccgggagcctggacaaaagacacggagaggggaccttcacgtctgatgtgtcatcttacttggaggaacaagcagctaaagagttcatcgcctggcttgtgaaaggcaggggacatggggagggaaccttcacttctgatgtaagctcctatctggaggagcaggccgcaaaggagttcatagcctggctcgttaagggacgcgggcatggcgaaggcaccttcaccagcgacgtgtcaagttatctggaagagcaagctgcaaaagaattcatcgcttggttggtcaaaggccgggggcacggggaaggcactttcacttctgatgtatcctcctatctcgaagagcaagctgctaaagaattcatcgcctggctggtcaagggcaggggtcacggcgagggaacctttacctccgacgttagctcctacctggaggagcaggcagccaaggagttcattgcttggctagtcaaaggcaggggacatggcgagggcacatttacctccgacgtgagcagctacctggaagagcaagcagccaaggaatttattgcttggctggttaagggccggggccatggtgagggcaccttcacaagtgacgtgagctcctacttggaggagcaagccgcaaaggagtttatcgcatggctggtgaaagggcggggacatggagaggggacgtttacgtcagatgtgagttcctacctggaggagcaggccgccaaggagttcatcgcgtggctcgtgaagggacggggacacggcgaaggcacttttacttccgatgttagcagttacttggaagagcaggccgccaaagaatttattgcttggctggtgaaggggagaggccacggggagggcacgtttacttctgacgtctcctcttacctggaagagcaggcggctaaggagttcattgcctggttagtgaagggacgcggaggcggggggggcggcggcagcggtgggggcgggtccggcggcggcggtagcgccgagagcaaatatggtcccccttgcccaccctgtcctgcacctgaggcggccggcggcccaagcgttttcctgttcccaccgaaacccaaggacactctgatgatatccagaacccctgaagtcacatgtgttgtggtggacgtgtctcaggaagacccagaagtgcagttcaattggtatgtcgacggcgtggaggtccacaatgctaaaacgaagcccagagaggagcagttcaatagcacctatcgcgtggtgtccgtccttaccgtgctccatcaggattggctgaacgggaaggagtataagtgtaaagtttcaaacaaggggctgccatcttcaattgagaagacaatttccaaagccaaaggtcagccccgcgagcctcaggtatatacgctgccacccagtcaagaagagatgacaaagaaccaggtgagtctgacctgcctggtgaaagggttttaccctagcgatattgcggtcgagtgggagtctaacggccagccagaaaataattataaaactacaccccctgttttagatagtgatggttccttctttctgtattcccgtttgactgtggataagtcacgctggcaggaaggaaatgtcttctcttgttccgtgatgcacgaagctctccataaccactacacccagaaatccttaagcctgagtctcggc

SEQ ID NO: 15777 - DNA, 1740 bp, synthetic construct
  misc_feature 1..1740: note = source = /note="Description of Artificial Sequence: Synthetic coding sequence"
  source 1..1740: mol_type = other DNA
atgaagtgggtctcattcatttccctcttgtttctgttcagctccgcctactccggtagcctggacaagaggcacggcgagggtactttcacctccgacgtttcctcttacctcgaggaacaggcggcaaaggaattcatcgcttggctggtgaagggaagggggcatggcgaaggcacgtttacatctgacgtatctagctatcttgaggaacaggcggccaaggaatttattgcttggctggtgaaaggaagaggccacggagagggaaccttcacatcagatgtgtcctcttacctcgaggagcaggccgccaaggagttcattgcgtggttggtaaaaggaagagggcatggggaagggaccttcaccagtgacgtttcatcctatctggaagagcaggctgcaaaggaattcattgcttggctggtcaaagggcggggacatggagagggaacatttacaagcgacgtgtctagctatcttgaagaacaggcagccaaagaattcatagcatggctggttaaaggaagagggcacggcgagggaacctttacctccgatgtttccagctacctggaggagcaggcagccaaagagttcattgcttggctcgtgaagggccggggccacggagaggggacatttacctcagacgtttcctcttaccttgaagaacaagcagctaaagaatttatcgcctggctggtcaagggtagggggcatggtgaaggtaccttcacaagtgacgtgagctcttacctggaggagcaggctgccaaggagtttattgcttggcttgttaagggtcgcggacacggagaggggactttcacctctgacgtttcatcctatcttgaggagcaggccgccaaggaattcatcgcttggttggttaagggccggggtcacggcgaagggacatttacctccgacgtgtcatcttaccttgaggaacaggcagctaaggagttcattgcctggctcgttaaaggacggggaggtggaggagggggcggctctggtggtggagggagtggaggaggaggcagcgctgaatctaagtacggccctccgtgccccccttgtcctgcccccgaagccgctggcggacctagtgtattcctctttccgccgaaacctaaggacacactcatgatatctcggacacctgaagtgacctgtgtcgtggtggacgtgagccaggaagatcccgaggtgcagttcaattggtatgtggatggcgtagaggtgcataatgccaaaactaagccgcgggaggagcagtttaactccacctatcgggtggtatccgtgctgacggtgctccatcaggactggctcaatggtaaggagtataagtgtaaggtttccaataaaggtcttccttcctctatcgaaaaaactatcagtaaggcgaaaggccagccacgcgaaccgcaggtgtatactctgcctccatcacaggaggaaatgacgaagaatcaggtgtctctgacttgcttggtgaagggcttctatccctctgacatcgcggttgagtgggagagcaatggacagcctgaaaacaactacaagaccacgcctcctgtcctggactccgatggttcctttttcctctacagtcgattgaccgttgataagtctagatggcaggagggaaacgtgttctcatgtagcgttatgcacgaagcccttcataaccattatacacagaagagtctttcactttccctcggc

SEQ ID NO: 15778 - DNA, 1740 bp, synthetic construct
  misc_feature 1..1740: note = source = /note="Description of Artificial Sequence: Synthetic coding sequence"
  source 1..1740: mol_type = other DNA
atgaagtgggtgagcttcatcagcttgctgttcctcttcagctctgcatattccggtagtcttgataaacggcatggcgaaggtacctttacctccgatgtaagcagctacctggaagagcaagctgccaaagaatttatcgcctggcttgttaaaggaaggggacacggggagggcacctttacctccgatgtttccagctacctggaggaacaagcagcaaaggaattcatagcatggctagtgaagggacgtggccacggggaaggcactttcacctctgatgttagttcctacctcgaagaacaggctgctaaggagttcatcgcatggttggtgaagggcaggggccatggcgagggaacttttacttctgacgtgtcatcctacctggaagaacaggcggctaaggagtttattgcatggctggtcaagggaagaggccacggtgaaggcaccttcacaagcgatgtgtcatcatatctcgaagagcaggctgctaaagaattcattgcttggctggtgaaaggcagaggccacggcgaaggaacattcacttccgacgtcagcagctacctggaagaacaagctgctaaggaatttattgcttggctggtgaagggacgcggccacggagagggcacctttaccagcgatgtttctagctatctggaagagcaggcagctaaagaattcatcgcttggctggtgaaggggagaggccacggagaagggacctttacatcagatgtgtcaagctacctggaagagcaggcagcaaaagaatttatcgcttggttagtgaagggacgtgggcacggagagggcacatttacttccgacgtcagctcatacctcgaagagcaagcggccaaagaatttatcgcctggctcgttaagggacgcggacacggcgaaggcacctttacaagcgatgtttcttcttatcttgaggagcaggccgctaaggaattcatcgcctggttagtcaaaggccgagggggaggcggaggtggaggatctggagggggcggcagtggcggaggagggtctgctgagagtaaatacggcccaccatgtccaccatgccccgcacccgaggcagcaggaggacccagcgtctttctttttccgccgaagcccaaggacaccctcatgattagccgcacccctgaggtgacctgtgttgtggttgacgtcagccaggaagatcctgaggtgcaattcaactggtacgtggacggtgttgaggtccacaacgcgaagactaagccccgggaggagcagttcaactctacctatcgagttgtgagtgtgcttacggtgctgcaccaagactggctgaacggcaaggagtacaagtgtaaagtatcaaataaagggctgccaagttcaatcgaaaaaaccatctcaaaagccaaagggcagcctcgggagcctcaagtttacacccttccaccatcccaggaggagatgactaagaaccaagtctctctgacatgcctcgtaaagggattctatccttcagacatcgctgtggagtgggaaagcaacggacaacctgagaacaactacaaaaccacacccccagtgcttgacagcgatgggagtttctttctgtacagcaggcttaccgtggataagtcccgctggcaggagggcaacgtgttttcgtgctccgtgatgcatgaggccctccataaccattatacacagaagtccttgtcactgtccttgggc

SEQ ID NO: 15779 - DNA, 1740 bp, synthetic construct
  misc_feature 1..1740: note = source = /note="Description of Artificial Sequence: Synthetic coding sequence"
  source 1..1740: mol_type = other DNA
atgaagtgggtttcgttcatctcactcctgttcctgttttcgtccgcctacagcggctcgctcgataagcgccacggtgaagggacgttcacgtccgacgtctcgagctacttggaggaacaggcagcgaaagaattcatagcctggctggtgaaaggacgtgggcatggagagggcaccttcacttctgacgtgtcgtcatatctggaggaacaggcggccaaggagttcatcgcatggctggtgaagggaagaggccacggagaaggaactttcacctcggacgtgagctcctacttggaagagcaagcagccaaagagttcatcgcgtggctcgtgaagggaaggggacacggagaggggacgttcacttccgatgtgagctcgtatctggaggaacaagccgcgaaggaattcatcgcctggttggtcaaaggacggggacacggagaaggaactttcacttccgacgtcagctcgtacctcgaagagcaggcggccaaagagtttatagcttggctcgtcaagggccggggtcacggtgaaggcacgtttacttcagatgtgtcatcatatctggaggaacaagcggcaaaggagttcatcgcctggctcgtgaagggaagagggcatggcgaaggtaccttcactagcgatgtgtcctcatatctggaagagcaggccgcaaaggagttcatcgcttggctcgtcaagggcaggggtcatggcgaaggcaccttcacctcagacgtgagctcgtaccttgaagagcaggctgccaaagaattcatcgcgtggctggtcaaaggtcgggggcacggtgaaggcaccttcacttcagacgtgtcgtcgtatctcgaagagcaagcggctaaggagtttatcgcctggctggtcaagggacgcggacatggagaaggaacttttaccagcgacgtctcctcctacctcgaggaacaggctgcgaaggaattcatcgcatggcttgtgaagggaagaggagggggcggagggggaggctccggtggtgggggatcggggggcggcggtagcgcagaatctaagtacggccctccgtgcccgccatgtccagctccggaagccgccggaggaccgagcgtctttctgtttcccccgaaaccgaaggacaccctgatgattagccgcacccctgaggtgacctgcgtggtcgtggacgtgtcgcaggaggatcctgaagtgcaattcaactggtatgttgacggagttgaggtgcataacgcgaaaaccaagccacgagaggagcagtttaacagcacttatcgcgttgtgtccgtgcttaccgtcttgcatcaggattggctcaatggaaaggagtacaaatgtaaagtctctaataagggactgccgtcctcaatcgaaaagactattagcaaagctaagggacagccccgggaaccgcaagtgtacaccctgccgccgtctcaagaagaaatgaccaagaaccaggtgtccctgacttgcctggtcaagggtttctacccctccgatatcgctgtcgagtgggaatcgaacggccaaccagaaaacaattacaaaaccactccacctgtgttggactccgatggatcattctttctgtactcgaggctcacggtcgacaagtccagatggcaggagggaaacgtgttctcgtgctcggtgatgcacgaagccctgcacaatcactacacccagaagtcactgtccctttccctgggc

SEQ ID NO: 15780 - DNA, 1740 bp, synthetic construct
  misc_feature 1..1740: note = source = /note="Description of Artificial Sequence: Synthetic coding sequence"
  source 1..1740: mol_type = other DNA
atgaagtgggtgagttttatctccctgctctttctatttagttcagcatacagtgggtcactggataagcggcacggggaaggcacttttacatctgacgtgtcttcctacctggaggagcaggccgcgaaggagttcatcgcctggttggtgaaagggcgcgggcacggtgaaggtactttcaccagcgacgtctctagctacctcgaggagcaagctgctaaggagtttatcgcctggctagtgaaaggacggggacacggcgaaggaacctttacttcagatgtatctagctatctcgaggagcaggctgctaaagaattcatagcatggctggttaaaggtaggggccacggcgaggggacctttacgtcagatgttagctcctacctggaggaacaagcggccaaagagtttattgcctggctcgtgaagggaaggggccacggggaaggcacatttacctcagatgtgagcagttacctagaagagcaggctgcgaaggagtttatcgcctggctggttaaaggcaggggacatggcgagggcacctttacatcagacgtcagctcttatctggaggaacaggctgcgaaagaattcatcgcgtggttggtgaaagggcgcggccatggggaaggcaccttcaccagcgacgtttccagctatttggaagagcaggccgcaaaggagtttattgcctggttagtgaagggtcgcggtcacggcgagggcacgtttacctccgatgtaagctcctacctggaggagcaggcagcaaaagagttcatcgcctggctggtcaagggccgtggacacggtgagggcacttttacgagcgatgtgagctcctatcttgaagagcaggcagctaaggagttcatcgcatggctggtgaaagggagaggccatggtgagggcactttcacctcagacgtcagctcatacctcgaggagcaggctgcaaaagagttcattgcctggttggtcaaggggcgggggggcggaggaggaggaggcagtggaggtgggggctccggaggtggagggtctgccgaatctaaatacgggccgccgtgtcctccatgtcccgcgcccgaggcggcaggggggccaagtgttttcctattccctcctaaacctaaggatacccttatgatatccagaacccccgaggtcacatgcgttgtcgtagatgtgtctcaagaagacccggaggtacagttcaactggtacgtagatggcgtcgaggttcacaacgccaagacaaaaccgcgggaggagcaattcaactctacataccgagtcgttagtgtgctgaccgtgctgcatcaagactggttgaacggtaaggaatataagtgtaaggtttccaacaaaggcttacctagttctatagagaaaaccatctcaaaggccaaggggcaaccgcgtgagcctcaggtttataccctccctccaagtcaggaggaaatgaccaagaatcaagtttctctaacttgcttggtgaagggtttttacccttccgatatcgcagtggagtgggaaagtaacggtcagcctgagaacaactacaaaaccacaccccctgttcttgactcagatgggtcatttttcctgtattccaggttgaccgttgacaagtcccggtggcaggaagggaatgtgtttagctgttcggtgatgcacgaggctctgcataatcattacacacagaaatctcttagcctgtctctgggc

SEQ ID NO: 15781 - DNA, 1740 bp, synthetic construct
  misc_feature 1..1740: note = source = /note="Description of Artificial Sequence: Synthetic coding sequence"
  source 1..1740: mol_type = other DNA
atgaaatgggtttcgtttatatcgttattatttctattttcgtcggcgtattcgggttcgttagataaacgacatggtgaaggtacgtttacgtcggatgtttcgtcgtatctagaagaacaagcggcgaaagaatttatagcgtggttagtaaaaggtcgaggtcatggtgaaggtacgtttacgtcggatgtttcgtcgtatttagaagaacaagcggcgaaagaatttatagcgtggttagtaaaaggtcgtggtcatggtgaaggtacgtttacgtcggatgtttcgtcgtatttagaagaacaagcggcgaaagaatttatagcgtggttagttaaaggtcgtggtcatggtgaaggtacgtttacgtcggatgtttcgtcgtatttagaagaacaagcggcgaaagaatttatagcgtggttagttaaaggtcgaggtcatggtgaaggtacgtttacgtcggatgtatcgtcgtatttagaagaacaagcggcgaaagaatttatagcgtggctagtaaaaggtcgtggtcatggtgaaggtacgtttacgtcggatgtttcgtcgtatttagaagaacaagcggcgaaagaatttatagcgtggctagtaaaaggtcgaggtcatggtgaaggtacgtttacgtcggatgtatcgtcgtatttagaagaacaagcggcgaaagaatttatagcgtggctagttaaaggtcgaggtcatggtgaaggtacgtttacgtcggatgtatcgtcgtatttagaagaacaagcggcgaaagaatttatagcgtggctagtaaaaggtcgtggtcatggtgaaggtacgtttacgtcggatgtatcgtcgtatttagaagaacaagcggcgaaagaatttatagcgtggttagtaaaaggtcgaggtcatggtgaaggtacgtttacgtcggatgtttcgtcgtatttagaagaacaagcggcgaaagaatttatagcgtggttagtaaaaggtcgaggtggtggtggtggtggtggttcgggtggtggtggttcgggtggtggtggttcggcggaatcgaaatatggtccgccgtgtccgccgtgtccggcgccggaagcggcgggtggtccgtcggtttttctatttccgccgaaaccgaaagatacgttaatgatatcgcgtacgccggaagtaacgtgtgtagttgtagatgtatcgcaagaagatccggaagtacaatttaattggtatgttgatggtgtagaagttcataatgcgaaaacgaaaccgcgagaagaacaatttaattcgacgtatcgtgtagtatcggtactaacggttttacatcaagattggctaaatggtaaagaatataaatgtaaagtatcgaataaaggtttaccgtcgtcgatagaaaaaacgatatcgaaagcgaaaggtcaaccgcgtgaaccgcaagtatatacgttaccgccgtcgcaagaagaaatgacgaaaaatcaagtttcgttaacgtgtttagttaaaggtttttatccgtcggatatagcggtagaatgggaatcgaatggtcaaccggaaaataattataaaacgacgccgccggtactagattcggatggttcgttttttttatattcgcgattaacggtagataaatcgcgttggcaagaaggtaatgtattttcgtgttcggtaatgcatgaagcgttacataatcattatacgcaaaaatcgttatcgttatcgttaggt

SEQ ID NO: 15782 - DNA, 1740 bp, synthetic construct
  misc_feature 1..1740: note = source = /note="Description of Artificial Sequence: Synthetic coding sequence"
  source 1..1740: mol_type = other DNA
atgaagtgggtgagctttatcagcctgctgtttcttttttcgtccgcatactcaggctcgctggacaagaggcatggtgaggggacttttactagcgatgtgtccagctaccttgaagagcaagcagcgaaggagttcatagcctggttggtgaaaggtagaggtcatggagaaggcacttttacctccgacgtgtcgtcctacttggaagaacaagcggcaaaagaattcatcgcttggctggtgaaggggaggggacatggggaaggaaccttcacgagcgacgtttcgtcatacttggaggaacaagctgcaaaagagtttatagcatggctcgtgaaaggccgcggtcatggtgagggaacttttacttcggatgtcagctcttacctcgaggaacaagccgcgaaagagttcatcgcatggctggtcaagggccgaggacacggagaaggtacctttacttccgacgtctcatcgtacttggaagagcaggcagcaaaggaattcatcgcgtggctcgtcaagggtaggggacatggagaagggaccttcacctcggacgtttcctcgtatcttgaagagcaggctgctaaagaattcatagcatggcttgtcaaaggccggggacacggcgagggaacctttacctcagatgtgagctcctatcttgaagaacaggccgccaaagagtttatcgcgtggctggtgaaagggagaggtcacggtgaaggcacgtttacctccgatgtttcgagctacctcgaagaacaggcggcaaaggagtttatcgcttggttggtcaagggacgagggcacggcgaaggcaccttcacttccgacgtttcatcatatctggaggaacaggccgcaaaagagttcatagcttggcttgtcaagggaagaggccacggcgagggcacttttacttccgatgtgtcgtcttacctcgaagagcaggcggccaaggaattcatagcgtggttggtgaagggccggggtgggggtggtggcggaggttccggagggggaggatccggaggaggaggatcagccgaatctaagtacggtcccccttgtccaccatgtcctgcccccgaggcagccggaggtccatcggtctttttgtttccgcctaaacctaaggatacgctcatgattagcagaacccctgaagtgacttgtgtggtcgtggatgtgagccaagaagatcctgaggtgcagttcaattggtatgtggacggagtggaggtgcataatgcaaagactaaaccgcgtgaggaacaattcaattccacctaccgcgtggtgtcggtccttaccgtcctccatcaagattggcttaacgggaaggaatacaagtgcaaggtgtcaaacaagggactgccttcatccattgaaaagaccatttcgaaggcaaagggacaaccacgcgaaccacaagtgtacactctgcctccttcccaagaagagatgaccaagaaccaggtttctcttacgtgtctggtgaagggtttttacccttcagatattgccgtggagtgggaatcaaacggccagccggagaacaactacaaaacgacgccaccagtgcttgattccgatggttcctttttcctgtactcccggcttaccgtcgacaaatcgagatggcaagaaggtaatgttttctcatgcagcgtgatgcatgaagcacttcacaaccattacactcaaaagtctctctccctcagcctggga

SEQ ID NO: 15783 - DNA, 1740 bp, synthetic construct
  misc_feature 1..1740: note = source = /note="Description of Artificial Sequence: Synthetic coding sequence"
  source 1..1740: mol_type = other DNA
atgaagtgggtgagcttcatttcgctcctgtttctgttttcgagcgcatattccggatcacttgacaagagacatggggagggaacgtttacgtcggatgtgagctcgtatctggaagaacaggctgctaaggagttcatcgcgtggctcgtgaaagggcgcggtcacggcgaaggtacttttacctcagacgtaagcagctaccttgaggaacaagcagccaaagagtttattgcgtggctggtcaaggggcgcggacacggagaaggcacttttacttctgacgtatcttcgtaccttgaagaacaagccgctaaggagttcatagcttggctggttaaaggtaggggacacggggaaggtacctttacttctgatgtgtcctcatacctggaggaacaggccgctaaagaattcattgcctggctggtgaaaggtcggggacatggtgaagggacctttacttctgacgtgtcaagttacttggaagaacaggcagcaaaggagtttatcgcttggttggtcaaaggccggggccacggcgaaggaactttcacctccgatgtatcatcctatctggaagagcaagccgcaaaagaattcattgcttggctcgtgaaggggcgtggacatggcgaaggaacttttacgtcggatgtctcaagctacttggaagagcaggccgcaaaggaattcatagcctggctggtgaagggccgggggcacggggagggcacttttacgtccgatgtgagttcgtatcttgaagagcaagcagcgaaagagtttattgcatggctggtcaagggaagaggacatggagagggcaccttcactagcgatgtgagttcctaccttgaagaacaggcagccaaggaattcatcgcctggttggtgaaaggacgtggtcatggggaggggaccttcacctccgatgtgtccagctacctcgaagaacaagccgcgaaggagtttatagcttggctggtgaagggtagaggcggtggaggaggtggtggatcgggtggcgggggtagcggaggcggaggatcggcggagtccaagtacggtcccccttgtccaccctgccccgcacctgaggcggcaggcggtccaagcgtgtttttgtttcccccgaaacctaaggacactcttatgattagccgaaccccagaagtgacttgtgtcgtggtggatgtgtcacaagaagatcctgaagtgcagtttaactggtacgttgacggcgtcgaagtgcataatgcaaaaacgaagccaagagaagagcagttcaactcaacctacagggtggtcagcgtcctcaccgtgcttcatcaggactggcttaacggaaaggaatacaaatgcaaggtgagcaacaagggactcccatcgtcgatcgagaaaaccatcagcaaggcaaaaggtcaacctagagagccacaagtttacaccctcccgccttcgcaagaagaaatgaccaagaatcaagtctcccttacctgtcttgtcaaggggttctaccccagcgacattgcggtggaatgggagtccaacggtcagcccgaaaacaattacaagactacgcctcctgtgctggattcggatggttcctttttcctctactcgagactgactgtcgataagtctcgctggcaagaagggaatgtttttagctgttcagtcatgcacgaagccctgcataaccattacacccaaaaatcactttcgctttccctgggt

SEQ ID NO: 15784 - DNA, 1740 bp, synthetic construct
  misc_feature 1..1740: note = source = /note="Description of Artificial Sequence: Synthetic coding sequence"
  source 1..1740: mol_type = other DNA
atgaagtgggtctcctttatctccctgctattccttttttctagtgcctattctggctcactcgataagcggcatggtgagggaacctttacctcggatgtgagttcatatctagaggagcaggccgcaaaagaattcatcgcgtggttggtgaagggccgcggccatggcgagggcacgtttactagcgacgtgagctcctatctcgaggaacaggctgcaaaggaatttatcgcgtggttggtgaagggcagaggccacggagagggaacttttacttcggatgtctcaagctacctggaggagcaggctgccaaagaattcatcgcatggcttgttaaaggtaggggccatggcgagggcactttcacctccgacgtttcttcctacctggaagaacaggccgccaaagagttcatcgcctggctcgtgaaagggcgcggtcatggagaaggcacctttacatctgacgtgtccagctatctggaggaacaagcggcgaaagaatttatcgcttggctggtgaaaggacgaggtcatggggagggcacattcacctctgatgtatcctcatacctggaggaacaagcggccaaggagttcatagcttggctggtgaagggccgaggccatggcgaaggaacctttacctctgatgttagctcttacctcgaagagcaggccgctaaggagtttatcgcttggctggttaagggtcgaggccacggcgaaggcacctttaccagtgacgtttcttcttatctggaagaacaggccgctaaggagttcatcgcctggctcgtgaagggcaggggacacggcgaagggactttcacatctgatgtctccagctatctggaagagcaggctgcgaaagaattcatcgcatggctagttaaaggacggggtcatggcgagggtacttttactagcgatgtgtcaagttacctggaagaacaggccgccaaggagtttatcgcctggctagtgaaagggcggggcgggggggggggcggaggttcgggcggtggaggttcaggcgggggtggcagtgccgagagtaaatatggaccgccgtgtccaccttgtcctgctccagaagcagccggtggtccctccgtcttccttttccctcccaaacccaaggacactctgatgattagtcgcacccccgaggtaacctgtgtcgtggtggatgtgagccaggaggaccccgaggtccagttcaactggtatgttgatggcgtggaggtgcataacgctaaaaccaaaccccgggaagagcagtttaattccacatatcgtgtggtgagtgtgctaaccgtgctgcaccaggactggttgaacgggaaagaatataagtgtaaggtatctaacaagggcttgccctccagcattgagaaaactatctccaaagcgaaagggcagcctcgagaacctcaagtgtacaccctacccccttcccaggaagaaatgactaaaaaccaggtctccctgacttgtttagtcaaaggtttttaccctagtgacatcgccgttgagtgggagtctaatggccagccggaaaacaattataaaacaacccctccagtacttgactccgatgggtcatttttcttgtatagcaggttaactgtagacaaatctcggtggcaagagggcaacgttttctcctgttctgtcatgcatgaggccttgcataatcactacacccaaaagagccttagcctgtcgctgggg

SEQ ID NO: 15785 - DNA, 1740 bp, synthetic construct
  misc_feature 1..1740: note = source = /note="Description of Artificial Sequence: Synthetic coding sequence"
  source 1..1740: mol_type = other DNA
atgaagtgggttagttttatcagtctgttattcctgttctctagtgcctactccggctctctggacaagcggcacggggagggtaccttcacaagtgacgtgtcaagttacctcgaagagcaggctgcaaaggagttcattgcatggctggtcaaaggcaggggacatggagaggggactttcacatcggatgtatcctcgtatctggaggaacaagccgccaaggagttcatagcatggttggtgaaaggacgaggtcatggggaaggaaccttcacaagcgacgtttccagctatcttgaagaacaggctgcgaaagagttcatcgcatggcttgtgaaggggagaggccacggggagggtactttcacgtccgacgtgtctagttacctcgaagaacaggctgcgaaagaatttatagcttggcttgtgaaaggccgggggcatggtgaaggtacattcacttccgatgtgagctcctatttagaagagcaggccgcaaaggaatttatagcgtggctcgttaagggccggggacatggcgagggaactttcacatctgacgtgtcttcctacttggaggagcaagcggccaaagagtttatagcatggttggtcaaagggcgcgggcatggagaggggactttcacaagcgatgtgtcttcttatcttgaggagcaggccgccaaagagttcattgcgtggctcgtgaagggacgcggccacggcgaaggaacatttacctccgatgtgagctcctacttggaagagcaggccgctaaggaatttatcgcctggcttgtgaaaggtaggggacacggggaaggaaccttcaccagtgatgtctcctcttacctcgaggaacaagctgctaaggagtttatcgcttggctggtcaaggggcgaggccacggcgaggggacattcacttcggatgtgtcctcgtatcttgaagaacaggcagcaaaggaattcatcgcctggttggtcaagggccggggaggcggaggcggagggggcagcggaggcggaggcagcggcggagggggtagtgcggagagtaaatatggtccaccatgccccccgtgtcctgccccggaagcagcgggcggaccctctgtcttcctctttccacctaagccaaaggacacactcatgattagtcgaactcctgaggttacatgtgtggtcgtagatgtgtctcaggaggatcctgaagtgcaatttaactggtacgttgatggagtcgaagtgcacaacgcaaagacaaaaccccgagaggaacaattcaacagtacctatcgcgttgtttctgtgctgaccgtgttgcatcaagattggctgaatggcaaagagtacaagtgtaaggtgtcaaataaggggctgccaagttccattgagaagactatatccaaggcaaaagggcagccaagggagccccaggtttatacactgcctcccagccaggaggaaatgaccaaaaatcaggtctccctcacttgcctggtaaaagggttttatccatccgacatcgctgtggagtgggaatccaatggacagcccgagaataattacaagaccacgccacccgttctggattccgatgggtccttctttctgtactcccgtctgacggtggataaaagtagatggcaagagggcaacgtgttttcgtgctcagtgatgcacgaggccctgcataaccattacactcagaagtctctgtctttatctttaggt

SEQ ID NO: 15786 - DNA, 1740 bp, synthetic construct
  misc_feature 1..1740: note = source = /note="Description of Artificial Sequence: Synthetic coding sequence"
  source 1..1740: mol_type = other DNA
atgaagtgggtgagcttcatatctctgctgttcctgttctcgtccgcctactccggtagccttgacaagagacatggagagggtactttcacctcggatgtatcgtcatacttggaagaacaagcagctaaagagttcattgcgtggctcgttaaaggccgcggacatggcgaaggaaccttcacctctgacgtcagctcctacctcgaagaacaggccgccaaggagtttatcgcttggcttgttaagggtagaggacacggagagggaacgtttacctccgatgtgtcgtcgtaccttgaagaacaagccgcaaaggagtttattgcgtggctggtcaagggtaggggtcatggagagggaactttcacctcagacgtgtcatcctacctcgaggaacaagcagcaaaggaattcatagcctggttggtaaaaggccggggacacggtgaagggactttcacttccgatgtgagcagctaccttgaagagcaggcagccaaagagtttatcgcatggcttgtgaagggacgcgggcacggcgaaggaacgttcacttctgacgtgtcaagttacctggaggagcaggcggccaaggaattcatcgcctggctggtcaaagggcgggggcacggcgaggggacctttaccagcgatgtgtctagctatcttgaagagcaagcggccaaagaattcatagcttggttggtcaagggtcgtggccatggggaaggaacttttacctcggatgtctcgtcctacctggaggaacaggccgcgaaggaattcattgcctggctcgtgaagggtcgcggccatggagagggcacgtttactagtgacgtctcctcctacttggaggaacaagctgcaaaagaattcatcgcatggctggttaagggaagaggccacggagagggcactttcacgtcggacgtgtcgtcctatctcgaagagcaggctgctaaagagtttattgcctggctggtgaaaggacggggcggaggaggaggcgggggatcggggggaggagggtcaggcggtggagggtcggcggagtcgaagtacggacctccatgtcctccgtgcccagccccggaagcggccggcggaccgtcggtctttctgttccctccaaagccaaaggacaccctgatgatcagcaggacccctgaagtgacttgtgtggtggtcgacgtcagccaggaggaccccgaggtgcaattcaactggtatgtcgacggtgtggaggtgcacaacgccaaaaccaagcccagggaagaacagttcaattctacttaccgggtcgtctccgtgctgaccgtgttgcatcaggattggctcaacggaaaggagtacaagtgcaaggtgtcaaataaggggctcccctcaagcatcgaaaaaactatctcaaaggccaagggacagccgcgcgaaccgcaagtctacaccctgccgccaagccaagaggaaatgaccaaaaatcaggtgtcactgacttgcctggtgaagggattctacccgtcagacatcgcggtggagtgggaaagcaacggacagcctgagaataactacaagaccaccccgccagtgctcgatagcgatggatccttcttcctgtactcgcgcctgactgtcgacaagtcccggtggcaggaaggtaacgtgttctcgtgctcggtgatgcacgaagctctccacaaccactacactcagaagagtctgagcctctccctggga

SEQ ID NO: 15787 - DNA, 1740 bp, synthetic construct
  misc_feature 1..1740: note = source = /note="Description of Artificial Sequence: Synthetic coding sequence"
  source 1..1740: mol_type = other DNA
atgaagtgggtgtcgttcatctccctgcttttcctgttctcaagtgcctattcgggatcgctcgacaaacgacacggggaaggaaccttcactagtgacgtgtcatcataccttgaagagcaggccgcgaaagagttcattgcgtggcttgttaaaggacgaggtcacggtgaggggactttcacttcggacgtgtcgtcgtacctcgaggaacaggcggccaaggaattcatagcatggcttgttaagggccgcggacacggcgagggcacctttaccagcgacgtcagctcttatctggaagagcaagcggcaaaggagttcattgcttggctcgtgaaggggaggggtcacggcgaaggcacgttcacttcggatgtgtcctcgtacctggaagaacaagctgcaaaagagttcatcgcctggctcgtcaagggtagaggccacggcgaagggacctttacctcggatgtcagcagctacttggaggaacaagctgccaaggagttcatcgcatggctggttaaaggccggggccatggagaggggaccttcacctcagatgtgtcgtcctaccttgaagaacaggcagcaaaagagtttatcgcttggttggtaaagggacgtggccatggagaaggtacgtttacgagtgatgtctcctcatacctcgaagagcaagccgctaaggagtttatcgcctggctggtgaagggtcggggccacggagaaggaacctttacctccgacgtgtccagctacctggaggagcaagccgccaaggagtttattgcctggcttgtaaagggccgcgggcatggcgaggggacctttacgtctgacgtgagctcgtatctcgaagagcaggctgctaaagaattcatcgcgtggctggtgaaaggtcggggacacggagagggtactttcacttctgatgtgagctcataccttgaggaacaggcagcgaaggaattcattgcctggttggtgaagggaagaggaggaggaggtgggggaggcagcggagggggaggatcgggaggaggaggctccgccgagtcgaagtacggaccaccttgcccgccatgcccagcgccagaggccgcgggaggcccgtccgtattcctgttccctccgaagccgaaagatactctcatgatctccagaactccggaagtgacttgtgtggtggtcgatgtctcgcaggaggacccggaggtgcagttcaattggtacgtcgacggtgtagaggtgcacaatgcgaaaacgaagccccgggaagagcagttcaactccacctaccgcgtggtgtcggtgctgactgtgctgcatcaggattggctgaacggaaaggaatacaagtgtaaggtgagcaacaaaggcttgccctcgtcaatcgaaaagactatctccaaggcgaagggacagccgcgcgagccacaggtctacaccctccctccctcacaggaggaaatgaccaagaatcaagtctccctcacctgcctggtgaaaggattctacccgagcgacatcgccgttgagtgggaaagcaatggacaaccagaaaacaactacaagaccactcctccggtgcttgacagcgacgggtcattcttcctgtactctcgcttgactgtcgataagtcaaggtggcaagaaggaaacgtgttctcctgctcggtgatgcatgaagcactgcacaaccattacactcagaagtcgctgtccctgagcctcggc

SEQ ID NO: 15788 - DNA, 1740 bp, synthetic construct
  misc_feature 1..1740: note = source = /note="Description of Artificial Sequence: Synthetic coding sequence"
  source 1..1740: mol_type = other DNA
atgaagtgggtgtcattcatttcgctgctttttctttttagctcggcctactccgggagccttgataagcggcacggcgaaggcacctttacttcagatgtttcttcgtatcttgaggaacaggcagcaaaagagttcattgcctggctcgtgaaaggacggggacatggcgaggggacgtttactagtgatgtgtcgtcatacctcgaagagcaagccgccaaggaattcatcgcatggttggttaaggggaggggtcacggagagggcaccttcacttcagacgtgtcctcctatctggaagaacaggcggctaaggaattcatagcgtggttggtcaagggaaggggtcatggagagggtacctttacgtcggatgtgagctcctaccttgaggaacaagcagccaaagagtttatcgcatggctggtcaaaggccggggccatggagaagggacctttacctccgatgtgagctcgtaccttgaagagcaggcagcaaaggaattcattgcatggcttgtcaagggtcgcggtcacggcgaaggtacttttacctctgatgttagctcttacctggaggaacaggccgcgaaggagttcatcgcctggctcgtcaagggacgcgggcatggcgaaggcacgttcacttcggatgtgtctagctacctggaagaacaagcggccaaagaattcatcgcttggctggtgaagggtcgggggcatggagaaggaacctttactagcgacgtgtcatcatacctcgaggagcaagctgcaaaggagtttatagcatggcttgttaaagggagaggacacggagaagggacgtttacctctgacgtgtcaagttaccttgaggagcaggcagccaaggagttcattgcttggctggtaaaaggtcgcggacacggtgaagggacttttacttccgacgtcagctcatacctggaagagcaagcggcgaaagagtttattgcttggcttgtgaaaggacgtggtggaggaggaggcggaggttcgggtggaggtggatcagggggtggagggtcggcggaatccaagtacggacctccttgccccccgtgcccagcacctgaagccgcaggagggccgagcgtgtttttgtttcctcccaagccaaaggacaccctgatgatttccagaacccctgaggtcacctgtgtggtagtggatgtgtcgcaggaagatccggaggtccagttcaattggtacgtcgatggagtggaggtgcataatgcaaagaccaagccccgtgaagaacaattcaactcaacctaccgagtggtatccgttctgacggtcctccaccaggattggctgaacggaaaggaatacaagtgtaaagtctcgaacaagggcctgccatcgtcaatcgaaaagacgatctcgaaagcaaagggtcagcctcgagaaccacaagtctatactctcccaccttcacaggaggaaatgaccaagaatcaagtgagcctcacttgtcttgtgaagggcttttacccttcggacattgctgtggaatgggaaagcaacggtcaaccagaaaacaactacaaaactactcccccagtcctcgactccgacgggtcttttttcctgtactccagacttaccgtggataagtccagatggcaagaaggtaacgtgtttagctgttcggtaatgcatgaagcactccataatcattacactcaaaagtccttgtcactttcgctcgga

SEQ ID NO: 15789 - DNA, 1740 bp, synthetic construct
  misc_feature 1..1740: note = source = /note="Description of Artificial Sequence: Synthetic coding sequence"
  source 1..1740: mol_type = other DNA
atgaaatgggtgagcttcatctcgctcctgttcctgttctcctctgcttactctggctccctggacaagcggcacggagaaggaacgtttaccagcgatgtctcctcctacctcgaagaacaggccgccaaggaattcatcgcctggcttgtgaagggacgcggtcatggtgaaggaacttttacctccgacgtttcttcttacctggaggaacaagcagccaaggaattcattgcctggctggtgaaaggcagaggacacggcgaaggcaccttcacgtcggacgtcagttcatatctggaagagcaggcagcgaaggaattcatcgcttggttggtaaagggaagagggcacggcgagggaacgtttacctcagacgtttcctcgtatttggaggaacaagcggcgaaggagtttatagcctggctggttaagggtcgcggccacggtgagggtaccttcactagcgacgtgtcgtcgtacctcgaagagcaagcagccaaagagttcatcgcttggctggtgaaggggcggggccatggcgagggtactttcacctcagacgtgtcatcgtacctggaagaacaggcggcaaaggagttcattgcttggctcgtcaagggtaggggacacggagagggaacttttacttcagacgtgtcatcatacttggaggagcaggcggccaaagaattcatcgcttggttggtcaagggacgcggacatggagaaggcactttcactagcgacgtgtcaagctacctcgaggaacaggcagccaaggagtttattgcatggcttgtaaaggggcgaggacatggggagggcaccttcacctcggatgtgtccagctacctggaagaacaagccgccaaagagttcatcgcgtggttggtgaagggaagaggtcacggagaggggaccttcacttcggacgtgagctcctatctcgaggaacaggcagcgaaagagtttatcgcatggctggtcaagggacgcgggggaggaggaggtggagggtcgggtggaggaggatctggcggaggaggcagcgctgaatccaagtacgggcccccgtgccccccatgcccggcccctgaagcggccggaggcccatcagtgttcctgtttccccctaagccgaaagatactcttatgatctctcggactccggaggtgacctgcgtcgtggttgatgtgtcgcaggaggaccccgaagtccagtttaactggtacgtggacggagtcgaggttcacaacgctaagaccaaaccgcgggaagagcaattcaactccacctaccgggtggtcagcgtcctgactgtgctccaccaggattggctgaatggcaaggaatacaagtgcaaggtgtcgaacaaaggcctcccgtcgtcgatcgaaaagaccatctccaaagctaagggacaacctagggagcctcaagtctacaccctgccaccatctcaggaagagatgacgaagaatcaggtgtcacttacttgtctggtgaaaggattctacccgtcggacatagcagtcgaatgggagagtaatggacaacctgaaaacaactacaaaaccactccgccagttctggattcggatggatcctttttcctgtacagccgcctgactgtggataaatcaagatggcaggaggggaacgtgttcagctgttccgttatgcatgaggctctgcacaatcattacacgcagaagagcttgagcctgagccttggc

SEQ ID NO: 15790 - DNA, 1740 bp, synthetic construct
  misc_feature 1..1740: note = source = /note="Description of Artificial Sequence: Synthetic coding sequence"
  source 1..1740: mol_type = other DNA
atgaagtgggtcagtttcattagtctgttgtttctgttttcttcagcttactccggttccctggataagaggcacggggagggcactttcacctctgacgtgtcctcatacttggaggagcaggccgctaaagagttcatcgcttggctggtgaaggggaggggtcatggcgaggggacgttcacctctgacgtgtcaagctacctcgaggaacaggcggcaaaagagttcattgcctggcttgttaagggaagaggccatggtgaaggaaccttcacctccgatgtatcctcctatctggaggagcaggcggccaaggaattcatcgcatggctggtgaagggccgcggccatggcgaaggcacttttacttccgacgtgtcttcctacctggaggaacaagccgcaaaagagtttattgcctggctggtgaaagggcggggtcacggcgaggggacattcacgtctgacgtctcttcctacctggaggaacaggcggcgaaggagttcattgcttggttggtgaagggtcggggccatggagaaggcacattcacaagcgatgtctcctcctatctggaggaacaggcggcaaaagagtttatagcatggctggtcaaaggacgagggcacggggagggcacattcacaagcgatgtctcatcctatctggaagaacaggccgcaaaggagttcatcgcttggctggtgaaaggcagaggccatggcgaaggcaccttcacctccgacgttagctcatatctggaggagcaggccgctaaagagtttatcgcatggctggtcaaaggacgcggacacggagaaggcacctttacaagcgacgtgagctcatacctagaagaacaggctgctaaggaatttattgcatggcttgtcaaaggccgggggcacggtgaagggactttcacctctgacgtatccagctacctagaggaacaagccgccaaagagttcatcgcctggctggttaagggccgaggcggtgggggcggaggaggttccggagggggaggaagcggggggggaggatctgcggagtccaagtacgggcccccctgtcccccatgtcctgctcctgaggccgccggcgggccttctgtgtttctctttcctcccaagcctaaggataccctgatgatcagtcgcaccccggaggtcacctgcgtggtcgtcgatgtctctcaggaagatcctgaagtccagttcaattggtacgtggatggagtggaagttcacaacgcaaagacgaagccaagggaggaacagtttaactccacgtaccgggtggtatcagtgctgactgtactccaccaggactggctgaacgggaaagaatacaaatgtaaggtatccaataagggccttccgagtagtatcgaaaagacaatttctaaagcgaagggccagcctcgggagcctcaggtatacaccctccccccgtcgcaggaggagatgaccaaaaaccaggtatcactcacttgtctagtgaaagggttttaccccagtgatattgccgtcgaatgggagtccaacggacagccagagaataattacaagaccacccctccagttcttgatagcgacggttcttttttcttatattcgcgcctaacagtcgataaatcgaggtggcaggaagggaacgtgttctcatgctctgtgatgcatgaagctctgcataatcactatacccagaaaagcctaagcctttctctgggc

SEQ ID NO: 15791 - DNA, 1740 bp, synthetic construct
  misc_feature 1..1740: note = source = /note="Description of Artificial Sequence: Synthetic coding sequence"
  source 1..1740: mol_type = other DNA
atgaaatgggtctcattcatatccctgttattcctattttcctccgcttattccggtagcttagacaaaagacacggagaaggtaccttcacttctgacgtatcttcataccttgaagagcaggctgcaaaggaatttattgcttggttagtcaaggggagaggtcatggtgaaggtaccttcacctctgatgttagttcctacttagaggaacaggcagccaaggagttcatcgcttggttggtcaaaggtcgtggacatggggaaggcactttcacgtccgatgtttcgagctatctcgaagaacaagctgcaaaggaatttatcgcatggttggttaagggacgtgggcatggggagggtacgttcacttcagatgtgtcaagctatctagaagagcaagcggctaaagaattcattgcttggctggttaagggaaggggtcatggggaaggtacttttacatccgatgtttcatcttatttggaggagcaggccgctaaggagtttattgcttggcttgttaaggggagaggacacggggagggaaccttcacttccgatgtgagctcttatttagaggagcaggcagccaaggaatttatagcttggttagtgaagggtaggggacatggtgaaggcacatttacatccgacgtatcatcttatctagaggaacaagccgctaaggagtttatcgcatggcttgttaagggacgtggacacggcgaggggacttttacctcagacgtgtcgagctatttggaggagcaggctgctaaggaattcattgcttggttagttaaaggaagaggacatggcgaagggacattcacgtccgatgtttcttcctacctcgaggagcaagctgcaaaggagtttatagcttggctcgtcaagggaagaggtcatggcgaggggacattcacatctgatgtttctagttatttggaggaacaggccgcaaaggagtttatcgcatggcttgttaagggtaggggcggtgggggaggcggcggttccggtggcggcggcagcgggggaggtggaagcgccgagagcaagtacggacccccttgtccaccatgtccggctcctgaagctgctggcggaccatccgttttcctcttccctccgaagcctaaggatactcttatgatttctcggaccccagaggtgacttgtgtagtcgtagatgttagtcaagaggacccggaagtgcagttcaattggtacgttgatggtgttgaagttcataacgcaaagaccaagcctagagaagagcaatttaactccacttacagggtggtgtcagttcttactgtattgcatcaggattggctgaacggaaaggaatataagtgtaaagtgtccaataagggactcccttcaagcattgaaaaaactatctctaaggcgaagggacagcccagggagcctcaggtctacacgcttcctcctagtcaggaagagatgactaagaatcaagtgtctttgacctgcctggttaaaggcttttatccatcagatattgctgtggagtgggaaagcaacggtcaacctgagaataattataaaacaactccgccagttctcgattcagacggttcgttcttcctttatagccgattgaccgttgataaatcacggtggcaggaaggaaacgtttttagctgcagcgttatgcatgaggcccttcataaccactacacccaaaagtcgctttcactatccctagga

SEQ ID NO: 15792 - DNA, 1740 bp, synthetic construct
  misc_feature 1..1740: note = source = /note="Description of Artificial Sequence: Synthetic coding sequence"
  source 1..1740: mol_type = other DNA
atgaagtgggtatccttcatcagcttgctgtttctgttttcaagcgcttattccgggagtttggataagcgccatggagaaggaacgttcacctcagatgtcagctcttacctggaagaacaggccgctaaggagttcatagcctggctcgtgaaagggagaggccacggagagggcaccttcacctctgatgtgtccagctatttagaagaacaggcagccaaggagttcatagcctggctcgtcaaagggagaggtcacggcgaagggacctttactagtgatgtatctagctatctggaggagcaagcggctaaagagttcatcgcttggttggtcaaaggacgggggcacggagaagggaccttcacttcggatgtctcgtcctacctggaagaacaggccgccaaggagtttattgcatggctggtcaaaggtcggggacatggggagggaacctttaccagcgacgtgtcttcatacttggaagagcaggcagccaaggaattcatcgcttggcttgttaaagggaggggccatggcgagggcacattcactagtgacgtgtcctcctaccttgaagaacaggcagctaaggaattcatcgcatggttggtgaaaggacgcggtcacggcgagggcactttcacatcggacgttagctcttacctggaggagcaagctgccaaagagttcatcgcctggcttgtgaagggaagaggtcatggcgaggggacgttcacttcagatgtttcaagctatctggaggagcaggcggccaaagagttcattgcgtggttagtgaaggggcgcggacatggggaaggcaccttcacctcagatgtcagctcttatcttgaggagcaggcagcaaaagagtttattgcctggttggtcaaggggcgcggacacggcgagggcaccttcaccagtgacgtgagtagctatctggaggagcaggccgctaaggagttcatagcgtggctcgtgaaggggaggggaggcggggggggggggggatcaggcggaggcggctctggtggggggggtagcgctgaatcgaagtatggtccgccatgtccaccttgccctgctcccgaggccgctggtgggccatccgtctttctctttccccctaaacccaaggatacccttatgatctcacgtaccccagaagtgacctgcgttgtcgtggatgtctcacaggaagatcccgaggttcagtttaattggtatgttgacggtgtcgaagtgcataatgcgaagacaaagcctagagaggagcagttcaactctacatatcgggtggtgagtgtgctcactgtgttgcaccaggactggctcaatggaaaagagtacaagtgcaaggtgtccaacaaaggcctgccatcctccattgaaaaaacaatctcaaaagccaagggtcagccccgcgagccgcaggtgtatactctgcccccatctcaggaagagatgaccaaaaaccaagtctcgctgacttgtctggtgaagggattctacccctctgacatcgctgtagaatgggagtcgaatggacaacccgagaacaactataaaacgacccctccggttctggattctgacgggtcgtttttcttgtattctcggctgaccgttgacaagagcagatggcaggaaggaaatgtttttagttgcagcgtcatgcatgaagcactccataaccattacacacagaaatccctctctttgagcttagga

SEQ ID NO: 15793 - DNA, 1740 bp, synthetic construct
  misc_feature 1..1740: note = source = /note="Description of Artificial Sequence: Synthetic coding sequence"
  source 1..1740: mol_type = other DNA
atgaagtgggtctcatttatcagccttttattccttttttctagcgcgtattcaggatcattagacaagcgacatggtgaaggtacgtttacatcagatgtaagcagctatctggaagagcaagccgctaaagaattcattgcctggttagtcaaaggccgtggacacggggaaggcaccttcacaagtgatgtcagttcatacttggaggaacaggccgcaaaagagtttatcgcgtggctggtcaagggacgtggccatggcgaggggactttcacgtctgatgtctcctcatacctcgaagaacaagctgctaaggagtttattgcgtggctggtaaaagggaggggtcatggagagggaacgttcacgagcgatgtctcttcgtacctagaggagcaagctgctaaggaatttattgcatggttagtgaagggacgcggtcatggagaaggaacttttacatcagacgttagtagctatctggaagagcaagcggctaaggaatttatcgcctggttggtaaaagggaggggacacggagaaggcacctttacctcagacgtctcaagctatctggaagaacaggcagctaaagaatttatcgcatggctggtcaaaggtaggggtcatggtgagggaacatttacatcggacgtttcaagctacttagaggaacaggcagcaaaggaatttatcgcatggcttgtgaaaggtcggggccatggagaaggtacatttacatcagacgtatctagctacttagaggagcaagcagctaaagaatttattgcctggcttgtaaaagggcgcggccacggagaaggaacgtttacaagtgatgtttcgtcatatctggaagaacaagcagctaaagaattcatcgcatggctcgtgaaaggacgcggccatggcgaagggacattcacatctgatgtgagcagctacctcgaagaacaagctgcaaaagaattcattgcatggttggtgaagggccgagggggagggggcggaggtggctcgggtggaggaggttcaggtggaggcggctctgccgagagtaaatatggtcctccttgccctccttgcccggctccggaagcggcgggaggtccttctgtgtttttgttccctcctaaaccgaaagatacattgatgattagccggaccccagaagttacatgtgtcgtggtggatgtgtcccaagaggatccggaagttcaatttaattggtatgtggatggagtggaagtccataatgcgaaaaccaagccacgtgaagaacaatttaattctacttatagggtcgtctccgtccttacagtcttacatcaggattggttaaatggaaaagagtataaatgtaaagtctctaataagggccttccgagtagtattgaaaaaacaattagcaaagcgaaaggacaacccagggaaccgcaggtgtatacgcttccaccatcccaggaggaaatgactaaaaaccaagtgtctttgacatgcctcgtgaagggtttctacccgagcgatatcgctgtcgaatgggagagtaatggacagccagagaataactataaaacgaccccaccagttctggactcggatggctcattttttctttattctcgcctgacagtggataaatcaagatggcaagagggtaatgtgttctcatgcagtgtaatgcatgaagcactgcataaccattatacacagaagtctttgagcctgtccctggga

SEQ ID NO: 15794 - DNA, 1740 bp, synthetic construct
  misc_feature 1..1740: note = source = /note="Description of Artificial Sequence: Synthetic coding sequence"
  source 1..1740: mol_type = other DNA
atgaagtgggtgtcgttcatctcgctgctgttcctgttctcatcggcctactcgggaagcctggacaaacggcatggtgaggggactttcacgtccgacgtgtcgtcgtaccttgaagaacaagcagcgaaggagtttatcgcctggttggtgaaaggtcggggacatggcgaaggaaccttcaccagtgacgtatcctcctacctggaggagcaagccgccaaggagttcatcgcgtggctggtcaagggacgggggcacggagaaggaacctttactagcgatgtttcctcatacctcgaagaacaggctgccaaggagtttattgcgtggcttgtcaagggacgaggtcacggagagggcacgtttactagcgacgtgtccagttacctcgaggaacaagccgctaaagagttcatcgcttggttggtaaagggtcgcggacacggtgaagggaccttcacctccgatgtgtcgagctacctcgaagagcaggcggctaaggagttcatagcttggctcgttaagggaaggggacacggagaaggtactttcacctcagacgtttcttcgtatctggaagaacaggcggcaaaagagttcatagcatggctcgtgaagggccggggccatggtgaaggaactttcaccagtgatgtcagctcgtatcttgaggaacaagcggcgaaggaattcatcgcctggcttgtgaaagggcgcggtcatggagagggtacctttacctccgatgtttcgtcatacctggaggaacaggcagcaaaagagtttattgcttggctggttaagggtagagggcacggggaaggcacctttacttccgacgtctcttcttatctcgaggagcaggccgccaaggaattcattgcctggttggtcaaggggaggggtcatggagaaggcactttcacttccgacgtgtcatcgtacctggaagagcaggcagctaaagagtttatcgcatggctggtgaagggacgcggcgggggcggcggcggaggctcgggaggtggcggatccggcggagggggaagcgccgaatccaagtacgggcctccttgtcccccgtgccccgccccggaggccgcaggggggccgagcgtgttcttgttcccaccgaaaccaaaagacaccctcatgatcagccgcactccagaagtcacgtgtgtggtggtggacgtcagccaggaagatccggaggtgcagttcaactggtacgtggatggcgttgaagtccacaacgcgaaaaccaagccgagagaagaacagttcaactctacctaccgggtggtgtcggtgctgacggtgctccaccaagactggcttaatgggaaggaatacaagtgcaaggtgtcaaacaagggactgccctcctcgatcgaaaaaactatctctaaggctaagggacagccacgcgagccgcaggtgtacacgctgccgccgagccaggaggagatgactaagaatcaagtctcattgacctgcctcgtgaagggattttacccgtcagatatcgccgtcgagtgggaaagcaatggacaaccagagaataactacaaaaccacccctcctgtcctggactcggatggttcgtttttcctgtacagccgcctgactgtggacaagtcaagatggcaggaaggaaacgtgttctcctgctccgtgatgcacgaagcgctccacaaccattacacgcaaaagtccctgtccctgagcctcgga

SEQ ID NO: 15795 - DNA, 1740 bp, synthetic construct
  misc_feature 1..1740: note = source = /note="Description of Artificial Sequence: Synthetic coding sequence"
  source 1..1740: mol_type = other DNA
atgaagtgggtttcttttatctccctgctcttcctgttttcgtccgcatactccggcagcctggataagcgccatggagagggtacctttaccagcgatgtatcctcatatctggaggagcaagcagcgaaggagtttattgcctggcttgtgaaagggcggggacatggagaaggcacttttacttcggacgtctcgtcgtacctggaggagcaggcagctaaagagtttattgcatggcttgtgaagggccgtggtcacggagaggggactttcacctcggacgtctcctcataccttgaggagcaggccgccaaagagtttatcgcatggctggtaaaggggcgggggcatggcgagggcacgtttaccagtgatgtttcgtcgtacctcgaggaacaagccgcgaaagagttcattgcatggttggtgaagggtcgcggacatggggaggggaccttcaccagtgacgtgagcagttacctggaagaacaggctgccaaggaattcatcgcgtggctcgtcaaagggagaggccacggtgaaggaacgtttacgtccgacgtgtcatcataccttgaagaacaagcagcgaaagaattcatagcctggctcgtaaaaggaaggggacacggcgagggaacttttacctcggatgtctcctcatatcttgaagaacaggcagcaaaagaattcatcgcctggctcgtgaaggggcgagggcatggagaagggacctttacctcagacgtgtcatcctacctggaggaacaagcagcaaaggagtttatagcttggctcgttaagggaagagggcacggagaaggaacctttacttccgatgtcagctcgtatctcgaagaacaggccgcgaaggagttcatcgcttggttggtcaaaggcagaggtcacggtgaaggcacgtttacttctgacgtcagctcgtacctcgaagagcaagctgcaaaggaattcattgcctggttggtgaaaggacgaggcggtggagggggtgggggctccggtggcggcggttcaggaggaggaggatcagccgaatcgaagtacgggccaccttgtcctccctgccctgcacccgaagcagctggtggtccatccgtgtttctttttccgccaaagccaaaggatactctcatgataagcagaacccctgaggtgacttgtgtcgtggtcgacgtctcacaagaagatcctgaagttcaattcaattggtacgtggatggagtggaagtccataatgcaaaaaccaagccgcgtgaagagcagtttaactcaacctaccgggtcgtgagcgtgctgaccgttcttcatcaagattggcttaacggcaaggaatacaagtgtaaagtgtcaaacaagggacttccctcgtctattgaaaaaactatttccaaggcaaaaggacaaccacgcgagccccaagtgtacaccctgccaccatcacaggaagaaatgactaagaaccaggtgagcctgacctgccttgttaagggcttttaccccagcgatattgcagtggaatgggaatctaacggtcaacctgagaataactacaagactaccccacctgtgctcgactctgatggctcgtttttcctgtacagcagactgactgtcgataagtcccggtggcaggaaggtaatgtgttctcgtgctccgtcatgcatgaagcgctgcataaccattacacccagaagtccctgtcgttgtcccttgga

SEQ ID NO: 15796 - DNA, 1740 bp, synthetic construct
  misc_feature 1..1740: note = source = /note="Description of Artificial Sequence: Synthetic coding sequence"
  source 1..1740: mol_type = other DNA
atgaaatgggtcagtttcataagtctcctgttcttattcagctctgcgtacagtggctctctggacaagcggcacggtgaagggacattcactagcgatgtgtcatcctatctggaagagcaggccgccaaagagtttattgcctggctcgtaaaggggcgcgggcacggggagggaacattcacatccgatgtgagctcttatctggaggagcaagccgccaaagagtttatcgcctggctggtcaagggtagaggacatggggaaggtacttttacctctgacgtgagttcttatttagaggagcaggctgccaaggagtttatcgcctggcttgttaagggccgggggcatggagaaggaaccttcactagcgatgtgtccagctacctggaggagcaggcagccaaagagtttattgcatggctagtgaaagggaggggtcacggggagggtacatttacgagtgatgtctcctcctacctagaggagcaggcagcaaaggagttcatcgcatggctcgtgaaaggcagaggacacggagagggtacattcacgagtgatgttagctcatacctggaagagcaggcggccaaggagtttattgcttggttggttaagggtcgaggtcatggagaaggtacttttacctccgacgtaagcagttacctggaagaacaggccgcaaaggagttcattgcctggctggttaaggggaggggccacggagagggcacgttcaccagcgatgtaagcagctacctggaggaacaggccgccaaagagtttattgcttggcttgtcaaagggaggggacacggagagggtacatttacgtctgacgtctcgtcttacctggaagagcaagctgcgaaagagttcatcgcgtggctggttaaagggcggggacacggtgaaggcaccttcacctcagatgtgagttcctacctcgaagaacaagcggctaaggagtttatcgcatggctggttaaagggcgtggtggtggtgggggcgggggcagcggtggggggggctctggtggcggcggatccgcggagagcaagtatgggcctccctgccctccgtgccctgcccctgaggcagccggggggccgtcagtctttctcttcccacccaagccaaaagataccctgatgatatccagaactcctgaggtgacctgcgtggtagtggatgtgtcacaggaagacccggaagttcagtttaattggtatgtggacggggtggaggtacataacgccaagacaaagccgagggaggagcagttcaacagtacctaccgagttgtgagcgtgttaactgtgctccatcaggattggctgaacggtaaagagtataaatgtaaagtgagtaataaggggcttcctagcagtatcgagaagacgatttctaaggctaaggggcaaccgagagaacctcaggtctataccttaccaccatcccaggaggaaatgacaaagaatcaggtctcccttacttgcttggttaagggattttacccatctgatattgctgttgaatgggagagtaatggtcagccagagaataactataagactaccccacccgtgttggattctgatggttctttttttctatattcccgcttgaccgttgataagtcgagatggcaggagggaaatgtattctcctgttcagtcatgcatgaagccctgcacaaccattacactcagaaaagtctctcactcagcctgggt

SEQ ID NO: 15797 - DNA, 1740 bp, synthetic construct
  misc_feature 1..1740: note = source = /note="Description of Artificial Sequence: Synthetic coding sequence"
  source 1..1740: mol_type = other DNA
atgaaatgggtgagcttcatctcactcctcttcctcttctcgagcgcctactcgggatcactggataagcgacatggggaaggaacttttacctccgatgtctcctcttacctggaagagcaggcagctaaagagttcattgcctggcttgtgaagggacggggccacggcgaagggacttttacctcagatgtatcctcctacttggaggagcaggccgctaaagaattcatcgcatggcttgtcaaaggacgcgggcacggtgagggaacttttacgagcgacgtgagctcgtacctggaggaacaggccgcaaaggagtttatcgcctggctcgtgaaggggcgcggccacggagagggaaccttcacctccgatgtatcaagctatctggaggaacaagcagcgaaggaattcatcgcctggctggtcaaggggaggggacatggtgaggggaccttcaccagcgacgtgtcaagctacctggaagaacaggccgccaaagaattcatagcgtggctcgtcaagggacgcggacacggcgaaggcaccttcacctcagacgttagtagctaccttgaagaacaggcggccaaggaattcattgcgtggttggtaaagggacgggggcacggtgaaggcactttcacttccgacgtgtcctcttacctcgaagaacaggcagcgaaggagttcatagcctggctggtgaaaggcagaggccatggcgagggtaccttcacttcggatgtgtcgtcctaccttgaggaacaagctgctaaggagtttatagcgtggttggtcaaaggacggggtcatggtgaagggacgtttactagcgatgtctcgtcgtatctcgaggagcaggcagcaaaggagttcattgcttggctggtgaagggaagaggacatggagagggcactttcacctccgacgtctcatcataccttgaagagcaagccgctaaggagttcatcgcttggctggttaaaggacgcggaggaggaggtggaggaggatccggaggagggggatcggggggtggcggcagtgcggagtcgaagtacggcccaccatgcccgccctgccccgcgccggaggccgccggaggcccttccgtgttccttttcccaccaaaacctaaagacacgttgatgatcagccgtactccggaagtgacctgcgtggtggtcgacgtgtcgcaagaagatccagaagtgcaattcaattggtacgtggacggggtcgaggtgcataacgcaaagaccaagcccagggaagaacagttcaattcgacttaccgcgtggtttcggttctcactgtcctgcaccaagactggctgaatggaaaggaatacaagtgtaaggtgtccaacaagggactcccgtcctcgatcgaaaagacgatctccaaggccaaaggacagccgcgggaacctcaggtgtacacgctgcctccgtcgcaggaagaaatgactaagaaccaggtgagcctgacttgtctggtgaaggggttctacccgtctgatatcgccgtggagtgggagtctaacggccagccggaaaacaactataagactaccccaccggtgctggactccgacggatcgtttttcctctactcgagactgaccgtggacaagtctaggtggcaagaaggtaacgtcttttcatgcagcgtgatgcacgaggcgctgcacaatcactacactcaaaaatcgctcagcttgtcccttggc

SEQ ID NO: 15798 - DNA, 1740 bp, synthetic construct
  misc_feature 1..1740: note = source = /note="Description of Artificial Sequence: Synthetic coding sequence"
  source 1..1740: mol_type = other DNA
atgaaatgggtctcttttatctccttgcttttcttgtttagctctgcttactccggctctctggacaagaggcatggtgaaggcacattcacgagcgatgtgtctagttatctcgaagagcaggccgcgaaggagttcatagcttggctcgttaagggccgcggacatggagaaggaaccttcacctccgacgtatctagttaccttgaggagcaggctgccaaggagttcatagcgtggctggtgaagggacgcggccatggcgagggcacattcacctcagacgtgtcaagctacctcgaggaacaagccgccaaggaattcatcgcttggcttgtcaaaggtagaggccacggtgaaggtactttcacttctgatgtgtcttcatacctcgaagaacaggctgctaaggagtttattgcttggttggtcaagggtaggggccatggcgagggtacattcacctccgatgtaagcagctacctggaggagcaggctgcgaaggagtttatcgcctggcttgtgaagggcaggggacacggtgagggaactttcactagtgacgtgtcttcctaccttgaggagcaagcagcgaaagagttcatagcttggctcgtgaaaggaaggggacacggtgagggcacattcacgagcgacgtgtcttcctatctcgaggaacaggccgccaaggagttcatcgcatggcttgtcaagggaaggggtcacggagaaggaacttttacaagcgacgtgtcatcttaccttgaggagcaagctgccaaagaatttatcgcttggctcgttaagggaaggggccacggcgagggcaccttcacctccgatgtaagctcatacctggaagaacaggcagcaaaagaattcatcgcttggctcgtgaagggtaggggccatggtgaaggaacatttacttcagatgtcagtagttatctggaggagcaggcggccaaggaattcatcgcttggttggtcaaaggcagaggaggcggtggcggtggaggatccggtggcggtggttctggcggtggcggaagcgctgaatccaaatacggtccaccctgccctccatgcccggcaccagaggcggctggaggtccatccgtgtttttgttcccgccaaagcctaaggataccctgatgatttctagaactccagaagtcacttgcgtcgtggtagacgtctcccaggaggacccagaggtgcagttcaactggtatgtcgacggtgtcgaggtccataatgctaagactaaaccaagggaggaacagtttaactccacatatagagtcgtgtccgtactcaccgtgttgcatcaagattggctgaatggcaaggaatacaagtgcaaagtctctaacaaaggactgccgtctagcattgaaaagacgatcagtaaggctaagggacagccgagagagcctcaggtgtatacactcccacctagccaggaggaaatgactaaaaaccaagtatccctgacctgcctcgtgaaaggattctatccgtccgatattgcagttgagtgggagagtaatggccagccagagaacaactacaaaaccacgccgcccgtgctcgactctgatggtagcttctttctgtattcacgccttactgtggataagtctagatggcaggagggtaatgtgttctcctgctctgtcatgcatgaggcactgcacaatcactatactcaaaagtccctgagcctctctttgggt

SEQ ID NO: 15799 - DNA, 1740 bp, synthetic construct
  misc_feature 1..1740: note = source = /note="Description of Artificial Sequence: Synthetic coding sequence"
  source 1..1740: mol_type = other DNA
atgaaatgggtatcgtttatatccctcctgtttctgttctcaagtgcatacagtggaagtcttgataaaaggcacggggagggaacttttacgtctgacgtttcgtcctatttggaagaacaggcagcaaaagagttcattgcctggctcgtaaaagggcggggacatggggaagggactttcacttccgatgtgtcgtcatatctagaagaacaggccgccaaagaattcattgcttggttagtcaaagggcggggacacggggaaggaacatttacttcagatgtgtcttcctatctcgaagagcaggctgcaaaagaattcatcgcttggcttgtcaaaggacgaggacacggagaggggacattcacatctgatgtttcatcttatttggaagaacaggcagccaaggaattcatagcctggctagtgaaagggaggggacatggagaaggaacattcacaagtgatgtttcttcttacctcgaggaacaggctgctaaagaattcatagcctggctggtaaaagggcgagggcatggggaagggacatttacatccgatgtgtcatcatatctagaggaacaagctgcaaaagaatttattgcttggctcgtcaaaggacggggacatggagaagggacattcacatctgatgtctcttcatatctggaagaacaggctgccaaagaattcatcgcctggctggtgaaggggagggggcatggggaagggactttcacttccgatgtatccagttacctggaagaacaggccgctaaagaatttattgcatggttggtaaaggggaggggacatggagaaggaacattcacgagtgatgtgtcatcgtacctggaagaacaggctgctaaagagttcatcgcctggttggtgaaaggacgggggcacggggagggaacattcacatctgatgttagttcttatctggaagaacaggccgcgaaagagttcatcgcttggcttgtgaaagggcgggggggagggggggggggggggtctgggggaggaggatctgggggaggaggaagtgctgaatcaaaatacgggcccccctgtcccccatgcccagcccctgaagccgccgggggaccttctgtatttctctttcctcccaagcccaaagatacactgatgatctctaggacacctgaagtgacatgtgtagtcgtggatgtgtcacaggaagatccagaagtgcagtttaattggtatgttgatggagtggaagtgcataacgctaaaactaaaccccgagaagaacagtttaactccacatacagagtggtatctgtgcttacagtgctccaccaagactggctcaatggaaaagagtataaatgtaaagtctcgaataaaggactcccctcctccattgaaaaaacaatctcaaaagcgaaaggacaacccagggaaccccaggtatatacactccctccctctcaggaagaaatgacaaaaaaccaggtttctcttacttgccttgtcaaagggttttacccctcagatatagctgttgaatgggaatctaatggacagcccgaaaataactataaaactacaccccccgtactagattcagatggatcattttttctttattctagactcactgtggacaaatcccggtggcaggaagggaacgttttttcctgcagtgtgatgcatgaagctctacataatcattacacgcagaaatctctttctctgagtctcgga

SEQ ID NO: 15800 - DNA, 1740 bp, synthetic construct
  misc_feature 1..1740: note = source = /note="Description of Artificial Sequence: Synthetic coding sequence"
  source 1..1740: mol_type = other DNA
atgaaatgggtcagttttatcagtctgctttttctcttttcctcagcatatagtggatctctagataagcggcatggagaaggaacatttacatccgatgtatcatcatatttggaagagcaggctgctaaggagtttatcgcctggttagttaagggaagggggcatggagaaggaacattcacttccgatgtgtcaagttatctagaagagcaggccgccaaagagtttatcgcctggctggtgaaggggcgaggacatggggagggaactttcacatcggatgtttctagttatcttgaggagcaggctgccaaggaatttattgcgtggctcgtgaaagggagggggcacggagaggggacttttacatctgacgtaagtagttacctcgaagaacaggcagcgaaggaattcatcgcatggctcgtcaaaggaagaggacatggggagggaacatttacgtctgatgtgtctagttatctggaagaacaggcggcaaaagaattcatcgcatggctggttaaaggacgcggacatggggaaggaacttttacttctgatgtgagttcttacctcgaagaacaggccgccaaagagttcatagcctggttagtgaaaggaagagggcatggagaggggactttcacatccgacgtaagttcctatctggaagaacaggcggcaaaagaattcatcgcttggctggtcaaaggacggggacacggggagggaactttcacatctgatgtatcctcataccttgaagaacaggcagccaaagaattcatagcctggctggtcaaagggcggggacacggggagggaactttcacatccgatgtgtcaagttatctggaagaacaggccgccaaggagtttatagcttggctggttaaaggaagaggacacggggaggggacttttacttccgatgtcagttcctatctggaagagcaggccgccaaagaattcatagcctggctcgttaaagggcgcgggggaggaggggggggaggatccgggggaggagggtctggaggaggaggaagtgctgagtctaaatacggacctccatgcccaccatgtcctgcccctgaagcagcgggagggccttccgtttttctgttccccccaaaacctaaggatacactgatgatctcaagaacaccagaagtaacttgtgtggtggtggacgtttcacaagaggatcccgaagtgcagtttaattggtatgtggatggggtcgaggtacacaatgccaaaactaaaccccgcgaagaacagtttaacagtacttatcgggtcgtatccgtactcacagtgctacatcaggattggctcaacggaaaagaatataaatgcaaagtgtcaaataagggactgccaagttccatagaaaagactatctccaaggccaaggggcagccacgggagccacaggtctatacactccctcccagtcaggaagaaatgacaaagaatcaggtgtctttaacatgccttgtaaaaggattctacccctcagacatagcagtcgaatgggaaagtaacgggcagcccgagaacaattataaaactacacccccagtgttggattctgatgggagtttctttttatattccaggcttactgtagacaaaagtagatggcaggaggggaacgtgttcagttgctctgttatgcatgaagccttacacaaccactatacacagaaatcactttccctcagtctgggg

SEQ ID NO: 15801 - DNA, 1740 bp, synthetic construct
  misc_feature 1..1740: note = source = /note="Description of Artificial Sequence: Synthetic coding sequence"
  source 1..1740: mol_type = other DNA
atgaaatgggtatctttcatttcattattatttttattttcatcagcatattctggatctttagataaaagacatggtgaaggaacatttactagtgatgtttcatcatatttagaagaacaagctgctaaagaattcattgcatggcttgtaaaaggaagaggacatggagaaggaactttcacttctgatgtttcttcttatttggaagaacaagcagcaaaagaattcattgcttggttggttaaaggacgtggtcatggagaaggaactttcacatcagatgtttcatcatatttagaagaacaagcagcaaaggaatttattgcatggttggttaaaggtagaggacacggagaaggaacttttacatctgatgtatcatcatatttagaagaacaagcagcaaaagaatttattgcatggttagttaagggtagaggacatggagaaggaacatttacttcagatgtttcatcatatcttgaagaacaagcagccaaggaatttatagcttggcttgtgaaaggaagaggacatggagaaggaacatttacaagcgatgtttcatcgtatttagaagaacaggctgcaaaagagtttattgcatggttagttaaaggaagaggacacggagaaggaacttttacttcagatgtttcatcatatttagaagagcaagcagctaaagaatttatagcatggttagttaaaggaagaggacatggtgaaggaacatttacttctgatgtatcttcatatcttgaagaacaagctgcaaaagaatttatagcatggttagtaaaaggacgaggacatggagaaggtacatttacgtctgatgtaagctcttatttagaagaacaagcagctaaagaatttattgcttggcttgttaagggaagaggacatggagaaggaacttttacatctgatgtatcatcatatcttgaggaacaagcagctaaagaatttatcgcatggttagtaaaaggaagaggaggaggtggaggggggggaagcggaggtggaggatctggggggggaggtagtgcagaatctaaatacggaccaccatgtccaccatgtccagcacctgaagctgcaggaggaccatctgtatttttgtttcctccaaaacctaaagatacattaatgatttcaaggaccccagaagttacatgtgttgttgttgatgtttcacaagaagatcctgaagtacaatttaattggtatgtagatggagttgaagttcataatgcaaaaacaaaaccaagagaagaacaattcaattcaacatatagagttgtatctgtacttacagtccttcatcaggattggttaaatggtaaggaatataaatgtaaagtaagtaataaaggtttaccaagtagtattgaaaaaactataagtaaagctaagggtcagcctagagaaccacaagtttatactctcccaccatctcaagaagaaatgacaaagaatcaagtatctttaacttgtttagttaaaggattctacccatccgatatagcagttgaatgggaatctaatgggcaaccagaaaataattataaaactactccaccagttttagatagtgatgggagtttttttttatatagtcgtttaactgtagataaatctagatggcaagaaggaaatgttttctcttgttcagtaatgcatgaagcattacataatcattatactcaaaaatctctttctttatctcttgga

SEQ ID NO: 15802 - DNA, 1740 bp, synthetic construct
  misc_feature 1..1740: note = source = /note="Description of Artificial Sequence: Synthetic coding sequence"
  source 1..1740: mol_type = other DNA
atgaagtgggtgtcttttatctccttgctgtttctgttctcttcggcatactccggttcgctggataaaaggcacggtgagggtaccttcacctcggatgtgagtagttacctggaagaacaagctgcaaaagagtttatcgcatggctcgtgaaaggccgtggtcatggcgagggaacttttacctccgatgtgtcaagctaccttgaagaacaggcggcaaaggagtttatcgcatggctggtcaaaggtagaggccacggggaaggtacttttaccagcgatgttagcagctaccttgaagaacaagcagcgaaagagtttatcgcctggctggtgaagggccgtggccatggtgagggtactttcacttccgacgtgtcctcttacctcgaagagcaggcagcgaaagaattcattgcgtggctggtgaaaggaagaggtcatggggaaggaacctttacgtccgatgtgtcaagttaccttgaagaacaggccgcaaaagaattcatagcgtggctggtgaagggacgcggtcatggcgaaggcaccttcaccagcgacgtgtccagttacctcgaagagcaagccgccaaagaattcatagcttggctcgtaaaggggcgagggcacggcgagggtacctttacctcagatgtgtcgagttacctggaagaacaggcagcaaaggagtttattgcatggttggtcaagggacgcgggcatggggaagggacctttacttccgatgtgtcctcgtatctcgaggaacaggcagcaaaggagttcattgcatggctggttaagggacggggtcatggagaaggcaccttcactagcgatgtttcatcttacctggaggaacaagcggccaaagagttcattgcttggcttgtcaagggacggggacatggcgagggcacgtttacgtcagacgtgtcctcataccttgaggagcaagctgcgaaggaattcattgcctggcttgtcaagggccggggagggggcggaggaggtgggtcaggcggaggaggttccggaggaggtggaagcgcagagagcaagtacggccctccttgccccccatgtcctgcccccgaagccgcaggtgggccatcggtttttctttttcctccaaagcccaaggacaccctcatgatttcgagaaccccggaagtgacttgtgtggtggtcgatgtgagccaggaggaccctgaagtgcagtttaactggtacgtcgatggagtcgaagtccacaatgccaagactaagcctcgagaagaacaattcaacagtacctacagagtcgtgtccgtgcttaccgtgctccatcaagactggcttaacgggaaggaatacaagtgcaaggtaagcaacaagggactgccctcctccattgaaaagactatcagcaaggcaaagggtcagcctagggaacctcaggtctacactctgccaccgagccaggaggaaatgactaaaaaccaagtgtcattgacgtgtctggtgaaaggattttacccatccgatatcgcagtggaatgggaatcgaatgggcaacccgaaaacaattacaagaccaccccaccagtgcttgattcggacggatcctttttcctgtattcgcgactcactgtcgacaaatcgagatggcaagagggaaacgtgtttagctgtagcgtcatgcacgaagcactccataatcactacactcaaaagtcgctttcgctttccctgggt

SEQ ID NO: 15803 - DNA, 1740 bp, synthetic construct
  misc_feature 1..1740: note = source = /note="Description of Artificial Sequence: Synthetic coding sequence"
  source 1..1740: mol_type = other DNA
atgaaatgggtgagcttcatttctcttctgttcctgttttcttccgcgtattccggcagtctcgataaacggcatggggagggaaccttcacatccgatgtctcttcatacctggaagaacaagcagctaaagaattcatcgcctggctggtgaaaggcagaggccatggggagggaacatttacaagcgacgtctccagctacttggaggagcaggcagccaaagagtttatagcctggcttgtgaaaggtaggggacacggggaaggcacctttacctctgacgtgagctcttacctcgaggaacaagctgctaaagagttcatcgcatggttggtgaaggggcgagggcacggtgagggcacattcacttcagacgtgagcagttacctggaagagcaggcggccaaggaatttattgcatggctcgtgaaaggcagaggccacggcgaaggcacattcactagcgatgtcagcagttacctggaggagcaggctgcgaaagaattcatcgcctggctggtgaagggccgcgggcacggcgaaggtactttcacatccgacgtctcaagttacctcgaggaacaagctgccaaggagttcatcgcctggctagtgaagggacgtggacatggggaaggtacatttacaagcgatgtgtctagttatctggaggagcaagccgccaaggaattcattgcctggttagtcaaggggcgggggcatggtgagggcacatttacaagtgacgtgtcctcttatttggaggagcaagcggccaaggaattcatagcatggttggtcaaaggtcgaggacacggagaaggcacctttaccagcgatgtcagttcttacctcgaggaacaggcagcaaaggaattcatcgcgtggttggtaaagggacggggccacggcgagggcacgtttacttctgatgtctcgtcttatctagaggagcaggcagctaaggagttcattgcctggcttgtaaagggacggggaggaggtggcgggggaggctccgggggtggcggaagcggtggtggggggagtgccgagagtaaatatggaccaccttgtcctccctgtcccgcgccggaagcagccggcggaccgagcgtattcttattcccgcccaagccgaaggataccctaatgatcagccggaccccagaggtcacgtgcgtggtcgttgacgtgtcccaagaagacccagaagtacagttcaattggtatgttgatggggtggaagtgcataacgccaagactaaacctagggaagagcagttcaattcgacttaccgtgttgtgtccgttttgaccgtcttacatcaggattggctcaacggcaaggagtacaagtgtaaggtatccaacaaaggcctgccatcctcaatcgaaaaaacaatctctaaagctaaaggacagcccagggaaccacaagtatacaccctgccaccctcacaggaagagatgaccaagaaccaggtttctttgacctgtctggtgaaaggcttctatccttcagatatcgctgtggagtgggaatcaaatgggcagcccgaaaacaactataagactacaccacccgtgctggatagcgatggttctttctttttgtatagcaggctgaccgtggacaagtcccgctggcaagagggaaacgttttttcctgcagcgtaatgcatgaggcactccacaaccactatacccaaaagagcctgagcctctcgttggga

SEQ ID NO: 15804 - DNA, 1740 bp, synthetic construct; identical to SEQ ID NO: 15755
  misc_feature 1..1740: note = source = /note="Description of Artificial Sequence: Synthetic coding sequence"
  source 1..1740: mol_type = other DNA

SEQ ID NO: 15805 - DNA, 1740 bp, synthetic construct
  misc_feature 1..1740: note = source = /note="Description of Artificial Sequence: Synthetic coding sequence"
  source 1..1740: mol_type = other DNA
atgaagtgggtgagttttatctcgttgctgttcctgttttccagcgcctattccgggtcgctcgacaagcgacacggcgaaggcactttcacatcagatgtgagttcttatctggaggaacaggccgcaaaggagtttatcgcttggctagtgaaagggaggggccatggtgaaggcacgttcaccagtgacgtgtctagctatctggaagagcaggccgcgaaggaatttatagcgtggctggtgaaaggaaggggacacggggaaggaactttcacgtccgatgtgtcctcgtatctagaggaacaggccgccaaggagttcatcgcctggctggtcaagggccgtggccacggggagggaacgtttaccagtgatgtgtccagctacctggaggagcaggcagccaaggaatttatcgcttggcttgtgaaaggacgaggacacggagaggggacctttacaagcgacgttagtagctatctggaggaacaggccgctaaagaatttattgcttggctggtgaaaggacggggccacggcgagggaacatttacatcggatgtcagctcgtatctcgaggagcaggccgccaaagagtttatagcctggctggtgaagggccgcggccatggcgagggaaccttcactagcgatgtcagttcttatctggaggagcaggctgctaaagagttcatcgcgtggttggtaaagggtcgcggtcacggcgagggaacgttcacgtctgatgtttcctcttacctagaggagcaggccgccaaggagtttattgcctggcttgtaaaaggacgaggacacggcgaggggactttcacaagcgacgtatcaagctatctagaggaacaggccgcaaaggagttcattgcctggcttgtgaagggcagaggccacggcgaggggacctttactagcgacgtgagcagttacctggaagagcaggccgctaaggaattcatcgcctggctggtgaaaggcagaggaggcggtggggggggcgggtcaggcggtggcgggtccggggggggcgggtccgctgagtccaagtacgggccgccatgtccgccctgccctgccccggaagccgccggaggcccctccgttttcctgttccctccaaagccgaaggatacactgatgatttcacgtacccctgaagtcacgtgcgtcgttgtcgatgttagccaggaggatccagaggtccagtttaactggtacgtggacggtgtggaggtgcacaatgcgaagactaagccccgcgaagagcagtttaactcaacctatagagtggtttccgtgctgactgtactgcaccaggattggttaaacggaaaggaatacaaatgtaaagtgtcaaataaaggtttgccatcttcgatcgagaaaaccatcagcaaggccaaggggcaaccccgtgagccacaggtttacacactgccaccatctcaggaagaaatgactaagaaccaggtctctctgacatgcctggttaaaggattctatccatctgatatcgcagttgaatgggaatccaacggacagcctgagaacaactacaagactaccccaccagtcctggacagtgatggttccttcttcctttactccagactgactgtcgataagtcacgatggcaggaaggcaacgttttttcgtgttccgtaatgcacgaagctcttcataaccattatactcagaagagcctctctctgagcctaggt

SEQ ID NO: 15806 - DNA, 1740 bp, synthetic construct
  misc_feature 1..1740: note = source = /note="Description of Artificial Sequence: Synthetic coding sequence"
  source 1..1740: mol_type = other DNA
atgaagtgggtgtcatttatctctcttctttttcttttctcgagcgcatactcgggctcccttgataagcggcatggtgaaggcacctttacctccgatgtttcgtcgtaccttgaggaacaagcagcaaaagagttcatagcatggcttgtcaagggtcgcgggcacggggaaggcacttttacctctgatgtgtcatcctacctcgaagaacaagcagccaaagagttcattgcatggctggtaaagggaagagggcatggagagggcacgtttactagtgacgtctcgagctaccttgaagagcaggctgcgaaagagtttatagcctggctggttaagggacggggtcatggcgagggtactttcacttccgatgtctcctcgtatctggaagaacaagccgcgaaggagtttatcgcctggctggtcaaaggtcgcggacacggagaggggacttttaccagtgatgtgagctcataccttgaagaacaggccgcaaaggaattcatagcttggctcgtcaagggcagaggccacggggagggtacgtttacttccgacgtctcgtcatatctcgaggagcaagcagctaaggaattcatcgcatggctcgtgaagggtagaggtcatggcgaaggtacctttacgagtgacgtgtcctcatacctcgaagagcaggcagcaaaagaattcattgcttggttggttaaggggcgtgggcatggagaaggaacttttacttccgatgtaagctcttacctggaggaacaagcggcgaaagaattcatcgcgtggcttgtgaagggtcggggtcacggggagggaactttcacttcggatgtctcgtcatacttggaagagcaagctgccaaggagtttattgcctggttggtcaagggaagaggacacggtgagggtacttttacctcagacgtaagctcatacctggaagaacaggctgcaaaggagttcatcgcctggctcgtgaaaggacgcggaggaggtggagggggagggtcgggtggaggtgggtccggaggaggcggatcggcagaatcgaagtacggccctccatgtccaccttgcccagcacctgaagctgccggaggaccatcagtgtttctctttccgcctaaacccaaagacaccctgatgatctcgaggaccccagaagtgacctgtgtggtggtggatgtgagccaggaagatccggaagtccagttcaattggtacgtggatggagttgaagtgcataacgcaaagaccaagccaagggaagaacagttcaattctacctaccgcgtcgtgtcggttcttaccgtgctgcatcaggactggcttaatgggaaggaatacaagtgcaaggtgtccaataagggcctgccctcgtcaattgagaaaacgatctcaaaggcgaagggccaaccacgagagccccaggtgtacaccctgcctccgtcgcaagaagagatgacgaaaaaccaggtcagcctcacctgtctggtgaaaggtttttaccctagcgatatagcagtggagtgggaatccaacggacaacccgaaaacaactacaaaactactcctcctgtgcttgattccgacggtagttttttcctgtactcacgattgacggtggacaagtcccgttggcaagaggggaacgtgttttcctgtagcgtcatgcatgaggcactgcacaaccattacacccaaaagtcgctttcgcttagcctgggc

SEQ ID NO: 15807 - DNA, 1740 bp, synthetic construct
  misc_feature 1..1740: note = source = /note="Description of Artificial Sequence: Synthetic coding sequence"
  source 1..1740: mol_type = other DNA
atgaagtgggtgagcttcatctccctgctctttttgttctcgtccgcgtacagcggatccctggacaagcgccacggcgagggtacttttacgagcgacgtctcgtcatacctcgaagagcaagccgctaaagagttcatcgcctggcttgtgaagggacggggccatggggaggggaccttcacgtcggatgtgagttcctatctggaagaacaggccgcgaaggaattcatagcgtggctcgtaaagggaaggggtcacggggaagggacttttacctcagacgtctcctcttatcttgaagagcaagcagccaaggagtttatcgcgtggcttgtcaagggaagaggccatggagaaggtacctttacctcggatgtcagttcgtaccttgaagaacaggctgcgaaagagttcattgcttggctggtgaagggacgcgggcacggggaaggaactttcacctccgatgtaagctcgtacctggaagagcaggcggctaaggagttcatcgcttggttggtaaaaggacgagggcacggagaaggcactttcacctcggacgttagctcataccttgaggagcaagctgccaaagaattcatagcctggctggtcaagggtaggggtcacggagagggcacctttacttctgacgtgtcaagctacttggaggagcaggctgcaaaagaattcatcgcatggctcgtcaagggtcgcggacatggagaaggaaccttcaccagcgacgtcagctcttacctcgaggagcaggcagcgaaagagtttatcgcttggctcgtgaaaggtagaggacatggcgaagggaccttcacttctgatgtctccagctacctggaggaacaggcagcaaaagagtttattgcatggctggttaagggacgggggcacggcgaaggaacctttacttcggatgtttcttcatacctggaagaacaagccgccaaggaattcattgcctggctcgtgaaggggagaggcggaggagggggaggaggttcaggcggaggcggctccggaggcggaggctccgcggaaagcaagtacggcccgccttgtcccccttgccccgccccggaggccgctgggggcccgtccgtgttcttgttcccgccgaaacctaaggacaccctgatgatcagccgaactccagaggtgacttgcgtggttgtggatgtcagccaggaggacccggaagtgcagtttaactggtacgttgacggcgtcgaagtccacaacgccaagaccaaaccacgcgaggaacaattcaattctacctaccgcgtggtgagcgtcctcacggtcctgcatcaggactggctgaatggaaaggagtacaagtgtaaggtgagcaataaaggactcccctcgtcgatcgaaaagactatctcgaaggccaagggacaacctcgggaaccacaggtgtacactctcccaccttcacaagaagagatgacgaagaatcaggtgtcgctgacttgcctggtgaaaggattctacccatcagatatcgccgtggaatgggagtcaaacgggcaaccagaaaacaactacaagactaccccgccggtgctcgactcggacggctcgttcttcctttactcaagactgaccgtggataagtctcgctggcaggaaggaaacgtgttctcatgctcagtgatgcatgaggcgttgcacaaccactacacccagaagtcgctgtccctgtccctgggt

SEQ ID NO: 15808 - DNA, 1740 bp, synthetic construct
  misc_feature 1..1740: note = source = /note="Description of Artificial Sequence: Synthetic coding sequence"
  source 1..1740: mol_type = other DNA
atgaagtgggtttccttcatctcactgctatttttgttctccagtgcatattccggtagcttggataaaaggcatggggaagggactttcacatctgatgtgtctagctatcttgaagagcaggcagcaaaggagttcattgcttggcttgtgaaaggcagaggtcatggtgagggaacgttcactagcgacgtgagctcatatctggaagagcaggccgcaaaggagtttattgcctggttagttaagggcagggggcatggggaaggcacatttacctccgacgtttcctcctacctagaagagcaggcggcgaaggagtttatagcttggttagtgaagggcagagggcacggagagggtacatttactagtgatgtttccagctacctggaagagcaagccgccaaggaattcattgcatggctggtcaaggggcggggacacggggaaggcacgtttaccagcgacgtgagttcatatctggaggaacaagccgccaaagaatttatagcttggttggtaaaaggtcggggccacggtgagggcacattcacatcagatgtgtcatcatacctggaggagcaggcagccaaagagttcatagcgtggctcgtcaaggggaggggacatggggaagggacattcacttctgacgtaagcagttatttagaagagcaggccgcgaaagaatttatcgcttggctcgttaaagggagggggcacggcgaaggcacatttacaagtgatgttagttcgtaccttgaggagcaggcagctaaagaatttatcgcttggctggttaaaggtagagggcatggtgagggcacattcacttcagacgtgagcagctacttggaggaacaggctgccaaagaatttatagcctggttagtgaaggggaggggacacggcgaaggtacgttcacatcggatgttagtagctacctcgaggagcaggctgcaaaagagtttatcgcctggcttgtgaaaggtaggggtgggggcgggggtgggggatctgggggaggcggtagcggggggggagggagtgctgaatctaaatatggacccccatgtcccccgtgtccggcacccgaggcagccggtggcccatcagtcttcttgttccctcctaaaccaaaggataccctgatgatttccaggaccccggaggttacatgcgtggtggtggatgtaagccaggaggaccctgaagtacagtttaattggtacgtagacggagtagaagtgcataacgctaagactaagccacgagaggagcagttcaactcaacttaccgagtcgtctcagttctgaccgtattgcatcaggattggctaaacgggaaggaatataagtgtaaggtgtccaataagggccttccaagcagcatcgaaaaaaccatctccaaggccaaggggcagccccgggaaccccaggtatataccctgcctccttcacaggaagagatgactaaaaatcaggtgagcctgacatgcctggttaagggattttacccttctgatatcgctgtcgagtgggagtctaatgggcagcccgagaataattataagacaacccctccggtgctggactcggacggatctttcttcctgtactctcggctgaccgtcgacaagagccgatggcaggagggaaacgttttcagctgcagcgttatgcatgaggctctgcataatcattatacccagaagtcactctctctttctttgggg

SEQ ID NO: 15809 - DNA, 1740 bp, synthetic construct
  misc_feature 1..1740: note = source = /note="Description of Artificial Sequence: Synthetic coding sequence"
  source 1..1740: mol_type = other DNA
atgaagtgggtgtcttttatctcactcctgtttcttttttcctccgcatactcggggtcgcttgacaagagacatggggaaggtactttcacgtcagatgtcagctcttaccttgaagaacaagctgcaaaggagttcattgcgtggcttgtcaagggtagaggccatggcgagggaactttcacttcggacgtgtcgtcatacctcgaagaacaagccgctaaggagtttattgcatggctggtgaagggaagaggtcatggggaaggcacctttacgtccgatgtgtcctcataccttgaggagcaagcagcgaaggagtttatagcatggttggttaagggccggggccatggtgaggggacttttaccagtgatgtgtcgtcctatcttgaagaacaggccgccaaagaattcattgcatggctcgtcaagggtcgcggacacggcgaaggaacctttaccagcgatgtatcttcgtacctggaggagcaagcggcaaaggaattcattgcctggcttgtgaaaggcagaggccatggagaaggaactttcacctcggatgtgagctcatacctggaagagcaggcagccaaggagtttatcgcatggctcgtaaagggtcgcggtcacggagaaggaacgtttacgagtgacgtgagctcgtatcttgaggagcaggccgcgaaagagtttatcgcgtggctcgtgaaggggcggggacatggggagggaacttttacctcagacgtgtcgagctacctggaggaacaagcggctaaagaattcatcgcatggcttgttaaaggtcggggtcacggtgagggcacctttacctcggacgtgtccagttacttggaggaacaggccgcaaaagagtttatagcgtggctggtcaagggtcgaggtcatggagaaggtacttttacctcggatgttagcagttacctggaagaacaggcagcaaaagagttcattgcttggttggtcaaagggaggggcggaggaggaggagggggtagcggtggaggaggctccggtgggggaggcagcgcggaaagcaagtacggtccaccttgtcccccttgcccagcacctgaagccgccgggggaccatcagtgtttctgttcccacccaagccaaaggatacccttatgatcagccgtactcctgaagtgacctgtgtcgtggtggatgtttcccaggaagatccagaagtgcagttcaactggtacgtggacggtgtggaagtgcataatgcaaagactaagcctcgggaagaacagtttaactcgacttaccgagtcgtgtccgtcctgaccgtcctccaccaagactggctgaatggaaaggaatacaagtgtaaagtgagcaacaagggactcccctcgtccattgaaaagaccatctccaaggcaaaaggacaacctagagaaccgcaagtgtatactctccctccaagccaggaagaaatgactaagaaccaagtgtccctgacctgccttgtcaaaggattctaccctagcgatattgcagtcgaatgggaatccaacggacagcccgagaacaattacaaaactacccctccggtcctcgattcagacggcagtttctttctgtactcgcgccttaccgtggataagtccaggtggcaagaaggaaacgtattttcctgttcggttatgcacgaggcactgcataatcactacactcaaaagtctctgtctctgtcacttggg

SEQ ID NO: 15810 - DNA, 1740 bp, synthetic construct
  misc_feature 1..1740: note = source = /note="Description of Artificial Sequence: Synthetic coding sequence"
  source 1..1740: mol_type = other DNA
atgaagtgggtaagttttatctccttgctgttccttttcagctccgcctactctggttcgctagacaagagacacggggaaggcacgttcacaagcgatgtgtcatcttatctcgaagagcaagcggccaaagagttcatcgcatggctggtcaaggggaggggccacggggaaggaacattcacctcggacgtctcaagctatctggaggagcaggcggcaaaagagttcattgcgtggctggtgaagggtagaggtcacggcgagggaaccttcacatcagatgtgtcctcttacttggaggagcaagcagcgaaagagttcatcgcctggttagttaagggaaggggccatggcgagggcacattcacctctgatgtctcctcgtacctggaggagcaggccgcgaaagagttcatcgcttggttagtcaagggccgcgggcatggggaagggactttcacttccgatgtcagctcttatctggaggagcaggctgccaaagagtttatagcttggctggttaaggggcgcggtcatggagagggtacctttacatccgacgtctcaagctacctggaggaacaggccgccaaagaatttattgcatggctcgttaaaggccgaggccacggggaggggacattcacgtcggacgtttcatcttatctggaagagcaagccgccaaagagtttatagcctggctggtcaagggtcgcggacacggggagggcacttttacatcagatgtttcctcctatctggaggaacaggccgcaaaagaattcatcgcatggctcgttaaagggagaggccacggtgaagggaccttcacaagtgacgtctcctcgtatctcgaagaacaagcggccaaagagtttatagcatggcttgtgaagggtcgcgggcacggagaaggaacgttcacctctgacgtcagcagctatttagaagagcaggccgccaaggaattcattgcatggctggtgaaagggcgagggggaggtgggggaggaggctctggtgggggcggtagcggaggaggcggcagtgcagaatccaagtacggcccaccttgccccccatgtcctgctccagaggcagcaggaggaccgtccgttttcctgtttccacccaagcctaaggataccctgatgatatccagaacgcccgaggtgacttgcgtggttgtggacgtgagccaggaggatccagaggtgcaatttaactggtatgtggacggggtggaagtgcacaatgccaaaaccaagcctagagaagagcagttcaacagcacatatcgcgtggtgtctgtgctcactgtgctgcaccaggactggctgaacggaaaagagtacaagtgtaaagtttcaaacaaaggacttccttcatccattgagaaaactatctcaaaggccaaaggccagccgcgagaaccccaggtctatacactcccaccatcgcaggaagagatgaccaagaatcaggttagcttaacctgcctcgtgaaaggcttctatccttcagatatagcggttgaatgggagtcgaacggacagcccgaaaacaattataagacaactcccccggttctagattctgacggatccttttttctctactcccggctaacagttgacaagagtcgatggcaggaaggtaatgtctttagctgttctgtgatgcacgaggcactacacaatcattatactcaaaagtcgttatcattaagtttaggg

SEQ ID NO: 15811 - DNA, 1740 bp, synthetic construct
  misc_feature 1..1740: note = source = /note="Description of Artificial Sequence: Synthetic coding sequence"
  source 1..1740: mol_type = other DNA
atgaagtgggtgtctttcatatcactcttattcctgttttcatctgcctactcaggcagcttggataagcgacacggggagggaactttcacctccgacgttagcagctacctcgaggagcaggcggctaaagaattcatcgcctggcttgtgaaagggcggggacacggcgaaggcacttttacctcggatgtgtcctcgtatctggaggagcaagcagccaaggagttcatcgcctggcttgtgaagggaaggggccacggggaaggcacatttacatcagatgtgtcatcctatttggaggagcaggccgctaaagaatttattgcatggctcgtgaaggggcgagggcacggcgaaggaactttcactagtgacgtctcatcctatctagaagagcaggccgctaaagagtttattgcgtggctggtaaagggacgcggtcatggagaaggcacctttacaagtgatgtctcgagttatcttgaggaacaggctgccaaggagttcattgcctggctggtgaagggccgcggtcatggggaggggacgtttaccagcgacgtgagttcttacctcgaagaacaggccgccaaggagttcatcgcctggcttgtgaaaggtagaggacatggggaaggaaccttcacttcagacgtctcttcctacctggaggagcaagctgccaaagagttcattgcatggttagtgaaaggcagaggacatggcgaggggaccttcacttccgacgtcagctcctacttggaggaacaggctgccaaggagttcatcgcatggctggtgaaagggagaggacacggcgaagggaccttcacttcagacgtctcatcctacctcgaagagcaggctgccaaggagttcattgcgtggctggtcaagggccggggccatggggaggggacattcacttccgacgtcagttcgtatcttgaggagcaagcagccaaggagttcatagcatggctggtgaaggggcgagggggggggggcggtggcggatctggcggtgggggaagtggtggcgggggttctgccgaatccaaatatggaccaccatgtcctccgtgcccggcgccggaagccgccggcgggccgtctgtgtttctcttccctccaaagcctaaggacaccttgatgataagtcgcaccccagaggttacgtgtgtagtggttgacgtctcacaggaagaccctgaggtacagttcaactggtatgtggatggcgtggaagttcacaatgcgaagacaaaaccccgcgaagagcagtttaattccacttatagggtcgtttccgtattaactgtcttgcatcaagattggcttaatggaaaggagtacaagtgtaaggtgagcaacaagggccttccttcgtctatagagaaaacgatatctaaagcaaagggccaacctcgggaacctcaggtgtacacgctgcccccaagtcaagaagaaatgactaagaatcaggtatcactgacgtgcttggtgaagggtttttacccttctgacatcgccgttgagtgggaaagtaacggacagcctgaaaacaactacaaaaccacccctcccgtgctggacagcgatgggagtttttttctgtactcccgactgacggttgacaaaagcaggtggcaagaagggaacgttttctcctgtagcgtgatgcatgaagcgcttcataaccactatactcagaagagcctgtcactatccctgggc

SEQ ID NO: 15812 - DNA, 1740 bp, synthetic construct
  misc_feature 1..1740: note = source = /note="Description of Artificial Sequence: Synthetic coding sequence"
  source 1..1740: mol_type = other DNA
atgaagtgggtgtctttcatttctctcctcttcctgttcagcagcgcctactccggatcgctggataaaaggcacggagagggtaccttcacctcggacgtttcctcatacctggaagaacaagcggcaaaagagtttatcgcgtggttggtcaagggacggggtcatggagaaggtactttcacgtcggacgtctcctcatacctcgaggaacaagccgctaaggaattcatcgcgtggctcgtaaagggacggggccacggagaagggactttcacctcggacgtttcatcatacctcgaggagcaggcggccaaagaattcattgcctggctcgtgaagggtcgcggacatggagaaggaaccttcacttcagacgtctcgtcgtacctggaagagcaggcagctaaggagtttattgcatggctggtaaaaggccgcggacatggcgaggggacttttacttccgacgtgtcgtcgtaccttgaggaacaggctgccaaagaattcatcgcatggttggttaagggccgtggacacggtgagggcaccttcacttctgacgtgagctcttacttggaagaacaagctgctaaggaattcattgcctggttggtgaagggtaggggacacggcgaaggcactttcacctctgatgtctcctcgtatctcgaagagcaagcagcgaaggaattcatcgcctggctggtaaagggtcgcggtcatggtgaaggcacctttacgagcgacgtcagctcctatttggaggaacaagctgctaaggagttcatagcctggctcgtgaaaggacggggacatggagaggggaccttcaccagtgacgtcagcagctaccttgaagagcaagctgcgaaggagtttatcgcctggcttgtgaagggacgagggcacggcgaaggaacgttcacttcagacgtgtcaagctatctggaggagcaggcagccaaagagttcatcgcctggttggtgaaaggacgaggagggggaggtggaggaggctcaggagggggcggttccggaggtggcggtagtgcagagagcaaatacggacccccgtgccccccatgtccggcaccagaagcggccgggggaccaagcgtgttcctctttcctcctaagccgaaggacacgctcatgatcagccgcacccccgaggtgacttgcgtggtggttgatgtgtcccaggaagatccggaagtccagttcaactggtacgtcgatggcgttgaggtgcacaacgccaaaactaaaccgcgggaggagcagttcaactcaacctaccgggttgtgtccgtgcttactgtgctgcatcaggattggctgaatggaaaggaatacaagtgcaaagtctcaaacaagggactgccgtcatcgatcgaaaagaccatctccaaggccaagggacagccgagggagcctcaagtgtacaccctgcctccgtcgcaggaagagatgaccaagaaccaagtgtcgctgacctgtctggtcaaggggttttacccaagcgacatcgcagtggagtgggagtccaacggccagccagagaacaattacaagactacgccgcctgtgctggattccgatggcagtttctttctctactctcgcctcactgtggacaagagcagatggcaggaaggaaatgtgttctcatgctccgtgatgcacgaagcgctgcacaatcactacacccagaaatccctgtcccttagcctgggg

SEQ ID NO: 15813 - DNA, 1740 bp, synthetic construct
  misc_feature 1..1740: note = source = /note="Description of Artificial Sequence: Synthetic coding sequence"
  source 1..1740: mol_type = other DNA
atgaaatgggtctcgtttatttctcttctgttcttgttcagcagtgcatatagcggtagtctcgacaaacgccatggtgagggaacattcacgtcggacgtgtcctcgtatcttgaagagcaagccgcaaaagagttcatagcttggctcgtcaagggacgaggccatggagaggggaccttcacaagtgacgtctcctcctaccttgaagagcaagctgctaaagaattcatcgcctggctcgtaaaagggagggggcatggagaaggaacctttacaagtgatgtgtcatcatacttggaggaacaggcagctaaggaatttattgcatggctcgtaaagggcagggggcatggggagggcacattcacgtctgatgtgtcgtcttaccttgaggagcaggctgccaaagaattcattgcctggctcgtcaaaggacggggtcacggcgaaggtacattcacgtcggatgtgagctcctatctagaggaacaggctgctaaggaattcatcgcgtggctagttaaaggacgcggccatggagagggcacatttactagcgatgtgagtagctatctggaggagcaagcggctaaggaattcattgcttggttggttaagggacgggggcacggagaaggcacctttacctccgatgtgagctcgtatcttgaggagcaagcggcaaaagagtttatcgcgtggctagtgaaggggcgaggtcatggtgaaggaactttcacctcggatgtgtcctcttacctcgaggaacaggcggccaaggagttcattgcctggctcgttaagggtcgaggccacggcgaaggtacatttacttctgatgtttcctcatatcttgaagagcaagctgccaaagaattcattgcttggctagttaagggtcgtggccatggagaggggacgtttacgtctgatgtgagcagctacttagaggagcaagccgccaaggaatttattgcctggctggtcaaaggacgagggggcggaggtggtgggggatcgggcggcggaggcagtggtggtggtggtagtgcagagtcgaagtatggtccgccatgtccgccgtgccctgcccctgaagctgctggaggaccctcagttttcctcttcccccccaaaccaaaagacacactgatgatctcccggaccccagaagtcacctgtgtcgtcgtggacgtttcacaggaggatccagaggtgcagttcaactggtatgtggacggcgttgaggttcacaatgctaaaaccaaaccccgcgaggagcagtttaactccacctaccgcgtcgtcagtgtgctaacagtgttgcatcaggattggctcaatgggaaggagtacaaatgtaaggtttctaacaaaggattaccttcgtccatcgaaaaaaccatctcaaaggccaaaggtcagccgcgggagcctcaggtctatacgttaccaccatcacaggaggaaatgactaagaaccaagttagcttaacgtgtctagttaagggattttacccatcggacatcgcagtagaatgggagtcaaacggacaaccagaaaataactacaagacgacgccgcccgtcctagattcggatggtagttttttcctgtatagtcgtttgactgttgataaaagccggtggcaagagggcaacgtcttttcatgttcagtgatgcacgaggcacttcacaaccattatacgcaaaagagcttgtcgctttctttggga

SEQ ID NO: 15814 - DNA, 1740 bp, synthetic construct
  misc_feature 1..1740: note = source = /note="Description of Artificial Sequence: Synthetic coding sequence"
  source 1..1740: mol_type = other DNA
atgaagtgggtgtccttcatctccctgctcttcctcttctcgtcagcttactccggctcgctggacaagcgccatggtgagggaacgttcacctcagatgtttcctcgtacttggaagagcaagccgccaaagagtttatagcgtggctggtcaaggggcgtggacatggcgagggtacctttacctccgatgtctcatcatacttggaggaacaggcagccaaagagttcattgcatggcttgtcaaaggacggggacacggggaaggaacctttacttctgacgtgtcatcttacctggaggaacaagcggctaaggagttcattgcttggttggtgaaagggcgaggacatggggaaggaactttcactagcgacgtctcaagctatcttgaggagcaggcggcaaaggaattcatcgcttggctggtgaaggggagagggcacggagaaggtacttttactagcgacgtctcgtcataccttgaagagcaagccgcaaaggagtttatcgcgtggctcgtcaagggtcggggacatggggagggtaccttcacgagcgatgtgtcgagctatcttgaggaacaagcagcgaaggagttcatcgcttggctcgttaagggacgcggccacggcgagggcacgttcacttcagacgtcagctcctacctggaagaacaggctgcaaaggagttcatagcctggctcgtgaaaggcagaggacacggagaagggacctttacctccgatgtgtcctcatacctggaagagcaggccgcgaaagaattcattgcctggctggtgaagggcagggggcacggggaaggtaccttcacttcggacgtcagctcatatctcgaagaacaagctgcgaaagagttcatcgcctggcttgtgaagggccgcggacacggcgaaggcaccttcacgtccgacgtttcgtcctatctggaggaacaggccgctaaggagttcatcgcatggcttgtcaaaggccggggtggaggaggcgggggcggatcgggtggaggaggctcgggcgggggcggtagcgcagaaagcaagtacggaccaccctgccctccgtgcccggctcccgaagcggcaggcgggccatcggtgttcctcttcccgccgaagccgaaggataccctgatgatctcccggacccctgaggtgacttgcgtcgtggtggacgtgagccaggaggaccctgaggtgcagtttaactggtacgtggacggcgtggaagtacataatgcgaaaactaagccgcgcgaggagcagtttaactccacctaccgcgtcgtatctgtcctcactgtgctgcaccaagactggctgaatggaaaagagtacaagtgtaaggtgagcaacaagggactgccttcctcgatcgaaaaaactatctcgaaggccaagggacaaccacgcgaaccccaggtgtacaccctccctccaagtcaagaagaaatgaccaagaatcaggtgtccctcacttgtctggtcaaggggttttacccttctgacatcgcagtcgagtgggagtcgaacggacaaccggaaaacaattacaaaaccacgccaccggtgcttgattcagatggttcctttttcttgtactcgagactcactgtggacaaatcaaggtggcaggaaggtaacgtgttcagctgctcggtgatgcatgaagcacttcacaaccactacacccagaagtccctctccctgagcctgggc

SEQ ID NO: 15815 - DNA, 1740 bp, synthetic construct
  misc_feature 1..1740: note = source = /note="Description of Artificial Sequence: Synthetic coding sequence"
  source 1..1740: mol_type = other DNA
atgaagtgggtatcattcatttcgctgctgtttctgttttcatcagcatactcaggatcgttggacaagcggcatggagaaggtacctttacctcggatgtatcctcgtatctcgaagaacaggctgcgaaggagtttatagcttggcttgtgaaagggcgcggtcatggagaaggcacctttacttcggatgttagttcctacctcgaggaacaggctgcaaaagagtttattgcgtggctggtaaagggacgcggacacggtgaaggcactttcacctcagatgtgtcatcatatctggaagaacaggcagcgaaggaattcattgcctggcttgtgaaggggcgtggccacggagaagggaccttcacctctgatgtgagttcatacctcgaggagcaagctgccaaggagttcatcgcgtggctggtcaaagggcggggacacggcgaaggtactttcacgagcgatgtctcctcctaccttgaagagcaggcagcgaaagaattcatagcatggctcgtcaagggtagagggcatggcgaggggacgtttaccagtgacgtgtccagctacttggaagaacaagcagccaaagagtttatcgcatggctggttaagggccgtggtcacggagaaggaacttttacttcagacgtgagctcgtacttggaagagcaggccgcaaaggagtttattgcttggctcgtgaagggcagaggacatggcgaagggacctttactagcgacgtctcgtcgtacctggaggaacaagccgctaaggagtttatcgcttggctggttaaaggcaggggtcatggagagggaactttcacttccgacgtgagctcctatcttgaagaacaggccgctaaggaattcatcgcatggttggtgaagggacgaggacatggtgaaggaacctttacctccgacgtttcttcgtaccttgaggaacaggcagcaaaagagttcattgcatggcttgtcaagggacggggaggtggcggaggtggtggatccggaggaggtggaagcgggggtggcggaagcgcagaatccaaatacggtcctccctgtccgccctgtccagcccctgaagccgcaggagggccttccgtgtttctctttcctcctaagccgaaggataccctgatgatatcgcgcaccccagaggttacttgtgtggtggtcgatgtgtcgcaagaggatcctgaggtgcagttcaattggtacgtggacggcgtggaagtgcataatgcgaaaacgaagccaagggaagagcagtttaactccacttacagagtcgtaagcgtgctgaccgtccttcatcaagattggctcaacgggaaagaatacaagtgtaaagtgtctaacaagggtctgccgtcaagcatcgaaaagaccatttcaaaagcaaagggacaacctcgggaaccacaggtctacacgctgccaccctcgcaagaagaaatgaccaagaaccaagtgtcactcacgtgcttggtgaagggtttttacccatctgacattgcagtggaatgggaaagcaatgggcaacctgaaaacaattacaaaaccactcccccagtccttgatagcgatggctctttctttctttactccagacttactgtggataagtcgagatggcaagagggtaacgtgttttcgtgctcggtgatgcacgaagcacttcataaccactacactcaaaagtcgctgtctcttagcctgggg

SEQ ID NO: 15816 - DNA, 1740 bp, synthetic construct
  misc_feature 1..1740: note = source = /note="Description of Artificial Sequence: Synthetic coding sequence"
  source 1..1740: mol_type = other DNA
atgaagtgggtgagcttcatctccctccttttcctcttcagctccgcctactcgggatcgctcgataagcgacacggcgagggaacgttcacttcagacgtatcttcatacctggaggagcaagccgcaaaggagtttatcgcctggctggtgaagggaagaggtcacggggagggcacctttactagcgatgtgtcatcctacctggaagagcaggctgccaaagagttcattgcgtggctcgtgaagggacgcggccacggcgaaggaactttcacttcggatgtctcgagctaccttgaagaacaagccgcgaaagaattcatcgcgtggttggtcaagggtcgcggacacggtgaaggtacgttcaccagtgacgtcagcagctacctggaggagcaagccgccaaggaatttattgcttggctggttaagggcagggggcacggagaaggcaccttcacctctgacgtctcgtcatatcttgaggagcaggcggccaaggagttcatcgcctggctggtgaaaggacgcggacatggtgagggcactttcacgtcggatgtgtcctcctatctcgaggagcaggccgcgaaagaattcattgcatggcttgttaagggacgggggcatggagagggtactttcacctcagatgtctcatcctaccttgaggaacaagcggccaaagaatttatcgcttggttggtgaagggccggggacatggcgaagggacctttaccagcgatgtctccagctacctcgaggaacaggctgcaaaagaatttatcgcgtggctcgtgaaaggcagaggacatggggaaggaactttcacttcggacgtctcctcatacctcgaagagcaagcagccaaggagttcatcgcttggctggttaagggccggggacatggagaaggcacttttaccagcgacgtgtcctcttaccttgaagaacaagcagctaaggaattcatagcctggctcgtaaagggacgtggcggtgggggcggaggaggaagcggaggtggggggtccggaggaggtggatccgcggaaagcaaatacgggccaccttgccccccgtgccctgcaccagaagcggccggaggaccatcagtgtttctgttcccgcctaagccgaaagacaccctgatgatctcgcgcactccggaagtgacctgcgtggtcgtggacgtcagccaggaggacccagaggtgcagttcaactggtacgtcgacggtgtcgaagtgcacaacgcaaagaccaagccgagagaagaacagttcaattccacgtaccgggtggtgtccgtgctcaccgtgctgcaccaggactggttgaatggaaaggaatacaagtgtaaagtgtcaaacaagggactgccgagttccatcgaaaagaccatcagcaaggctaagggacaacccagggagccacaggtgtacactctgccgccaagccaggaagaaatgactaagaatcaggtgtccctgacctgtctggtcaaagggttctacccgtcagatatcgcagtggaatgggagtcaaacggacagcccgagaacaactacaaaaccactccgcctgtgctggactcggacggcagctttttcctgtactcgcgcctgactgtggataagtcgcggtggcaggagggcaatgtgttctcgtgctcggtgatgcacgaagccctgcataaccactacacccaaaagtcgttgtcgctgtcgctggga

SEQ ID NO: 15817 - DNA, 1740 bp, synthetic construct
  misc_feature 1..1740: note = source = /note="Description of Artificial Sequence: Synthetic coding sequence"
  source 1..1740: mol_type = other DNA
atgaaatgggtttcatttatctctctcctgtttctgttctcaagtgcctatagcggtagcctggataaacgacatggcgagggaacattcacatctgatgtatccagctatttggaggagcaggccgccaaggaattcatcgcttggttggtaaagggtcgcggacatggtgagggaaccttcaccagcgacgttagcagctatctggaggagcaggccgccaaagagtttattgcctggctcgtaaagggtagagggcatggggaaggtacattcacaagcgatgtgagctcatacctcgaagagcaagctgcaaaggaatttatcgcatggctggtcaaaggtcgtggccacggagagggaacatttaccagcgacgtgtcctcatatctcgaagagcaggccgccaaagaattcattgcctggctggtgaaaggacgcggccacggagagggcacttttacttctgatgtgagctcctatttggaagaacaggctgccaaggaatttatcgcctggctcgtgaagggcaggggccatggcgagggtacattcacctccgatgtctctagttacctggaggagcaagccgcaaaagagtttattgcttggcttgtaaaagggcggggccacggcgaaggcacattcactagtgatgtcagttcctaccttgaggagcaggccgcaaaagagttcattgcttggttggtcaaaggacgaggtcacggagaggggacttttacctctgatgtttcatcttacctggaggagcaggccgcgaaagaattcattgcctggctcgttaaggggagagggcacggcgaagggacattcacttccgacgtgagcagttacctggaagagcaggcagcaaaggagttcattgcatggctcgttaaggggcgtggccacggcgaaggcactttcacatccgacgtgtctagctatctggaggaacaggcagccaaggagttcatcgcatggctggtgaaaggaagaggggggggaggtggagggggaagcgggggtggagggtcagggggggggggttccgccgagagcaagtacggacccccttgcccaccatgcccggcccctgaggcggccggcgggccttcagtgtttttgtttccacctaagcctaaggatacactgatgatttcacgtacccctgaggtgacatgtgtggtcgtcgatgtaagtcaggaggatcccgaagtacagttcaattggtatgttgacggcgtcgaggtgcacaacgctaaaacaaaacctcgcgaagaacagttcaattcgacctatcgggtggtgtccgtgttgacagtcctgcatcaagattggttgaacggaaaggaatataaatgcaaagtgtccaacaaagggctgcctagctccattgaaaaaactatctccaaggccaagggccagccaagagaacctcaggtgtacactctgcctccgtcccaggaggagatgactaagaaccaggtgagcttgacttgcctcgtaaagggtttttatccctctgatatcgccgtggaatgggaaagtaacggccagcctgaaaataattataaaactaccccccctgtgctggattctgacggtagctttttcttgtactccaggctcactgtcgataaaagcagatggcaggagggtaacgtgttcagttgcagtgttatgcatgaagccctccacaatcattatacccagaagagcctttctctgtcacttggt

SEQ ID NO: 15818 - DNA, 1740 bp, synthetic construct
  misc_feature 1..1740: note = source = /note="Description of Artificial Sequence: Synthetic coding sequence"
  source 1..1740: mol_type = other DNA
atgaagtgggtgagcttcatctccttgctatttctcttcagttccgcgtatagcgggagcttggataagaggcatggggagggcaccttcacatcagacgtgtcttcctaccttgaggagcaggcagcaaaagaatttattgcatggttggtgaaaggcagaggccatggggaggggaccttcacaagcgatgtgtcctcgtatcttgaagaacaagccgcgaaagaattcattgcatggctcgttaagggtagaggccacggagagggcacatttactagtgacgttagctcgtaccttgaggaacaggccgctaaagagttcattgcatggctggtaaaagggagaggacatggggaaggtacattcacttcagacgtgtcgtcctatcttgaggaacaagctgctaaagaattcatcgcctggctggttaaaggccgggggcacggggagggaacttttacttcagacgtgtccagctacttggaggagcaggcagccaaggagttcatcgcctggttagtgaagggtagaggacacggcgagggcactttcacctccgatgtctctagttatctggaagagcaggccgccaaggaattcattgcctggctggtgaaagggcgggggcacggagaaggcacttttaccagtgatgtatccagctatttggaagaacaggccgccaaggagttcatcgcctggctggtgaagggtcgcggccacggggaggggacctttacgagtgatgtgagctcctacctggaagagcaggctgccaaagagttcatcgcatggctggtgaaggggagagggcatggggaagggactttcacatcagacgtgagcagctatctcgaggaacaagccgccaaggaattcattgcatggctggttaagggaaggggtcacggggaaggtacctttactagcgacgtgagcagctatctggaggagcaggccgctaaggagttcatagcctggctggtgaagggtcgggggggcggtggaggcggcggaagtggtggcgggggctccggaggggggggttctgctgagagtaagtatggtccaccatgccctccatgtcctgcccccgaggccgctggcgggccttctgtgttcctttttccaccaaagcccaaagatacactgatgatttctaggactcccgaggtgacctgtgtcgttgtggacgtaagccaggaggatcctgaggtgcagttcaattggtacgtggacggggtcgaagtacacaacgcgaagaccaaaccaagggaagagcaatttaatagcacatatagggttgtcagcgtcttgaccgttctgcaccaggactggttgaacggcaaagagtataagtgtaaagtctccaataaaggactcccctcttcaatagaaaagaccatttctaaggccaagggacagcccagagagccccaggtctacaccctccccccctctcaggaggagatgactaaaaatcaggtgagtttgacatgtctggttaagggattttacccctctgacattgccgtggagtgggaatccaacgggcagcccgaaaacaattacaagaccacaccgcccgtgctcgattccgatggctctttctttctgtatagcaggcttaccgttgataagagccggtggcaggaggggaacgtgttcagttgcagcgtgatgcatgaggccctgcacaaccattacacgcagaagtccttgtctctcagcctcgga

SEQ ID NO: 15819 - DNA, 1740 bp, synthetic construct
  misc_feature 1..1740: note = source = /note="Description of Artificial Sequence: Synthetic coding sequence"
  source 1..1740: mol_type = other DNA
atgaagtgggtttccttcatctctttgctgttcctctttagtagtgcttatagcggtagtctggacaagcgtcacggcgagggtactttcacttcggatgtctcgtcctatcttgaagagcaggctgctaaggagttcatcgcctggctagtgaagggccgtggccacggcgagggtaccttcacatctgacgttagttcttacttggaggagcaggcggccaaagagtttatcgcgtggctcgtcaagggacgggggcatggtgagggaacttttacctccgatgtctcgtcctacctggaggagcaggccgctaaagagtttatcgcatggcttgtcaagggccgcggacacggggagggtacgttcacttccgacgtctcttcgtaccttgaggaacaggctgccaaggagttcattgcctggttggtcaaaggccgtggtcatggtgagggcactttcacctcggacgtaagcagctacttggaggagcaagctgcaaaggagttcatcgcgtggcttgtgaagggtcgcggtcacggagagggcaccttcaccagcgatgtctccagctatttggaggagcaggccgccaaggaatttattgcttggctcgtcaaaggtcggggtcacggtgagggcacgtttacatctgacgtctcctcttatttggaagagcaagcggccaaggaattcatcgcctggctggtcaagggccgtggccatggagagggaacttttacttccgacgtgagtagctacttggaagagcaagccgccaaggagttcatcgcctggctcgtcaagggtcgtggccatggtgaaggcactttcacctccgatgtatcttcctacttagaggaacaagcggctaaagagttcatcgcatggctagtcaaaggccgcggtcacggagagggtaccttcacgtccgatgttagttcctacctcgaagagcaagctgccaaggagttcattgcatggttggtaaaggggcgaggcggaggcggcggaggcggttccggtggaggaggtagcggtggtggaggctctgccgaatcgaaatacggtcccccttgtcccccttgcccggccccggaagcggctggaggaccctctgtcttcctattccccccgaagcccaaggatacgcttatgataagtcgcacgccagaagtcacatgcgtggtcgtagacgttagccaagaggaccctgaggtgcagttcaattggtacgtggatggtgtcgaagtacacaatgccaagacaaagcctcgagaagagcagttcaactcgacgtaccgtgttgtctccgtgctcactgtcctgcaccaagattggctgaacgggaaggagtacaagtgcaaggtctctaataagggtctgccatcctcaatcgagaagaccatctccaaggccaagggccagccgcgcgaaccacaggtatatactctccctcccagccaggaggagatgaccaagaaccaagtgagcctcacctgccttgttaagggtttctacccttctgatatcgccgtggagtgggagagtaacggacagccggagaataattacaagactacccctcccgtcctggattcagacggaagcttcttcctgtactctcgcctcaccgtcgataagagtcgttggcaagagggcaacgtcttctcctgttccgtaatgcacgaagcgctgcacaaccactatacgcagaagagcttatcactgagcctcggg

SEQ ID NO: 15820 - DNA, 1740 bp, synthetic construct
  misc_feature 1..1740: note = source = /note="Description of Artificial Sequence: Synthetic coding sequence"
  source 1..1740: mol_type = other DNA
atgaagtgggtgtcctttatctcgcttctgttcctgtttagctctgcatactcgggctcgctcgacaagcgtcatggagaaggcacctttacctccgacgtttcttcctacctcgaggaacaggctgcaaaggagtttatagcgtggttggtgaagggtcgaggtcacggggaaggaaccttcacctccgatgtgtcgtcttaccttgaagaacaggccgcgaaggagtttatcgcgtggctcgttaagggtcgtggtcatggtgaaggaacctttactagtgatgtgagttcctaccttgaggagcaggcggcgaaggagttcatagcttggctggttaagggtaggggtcatggcgaaggaacgttcacttccgacgtgtcaagttatctcgaagaacaggcagccaaagagtttattgcctggttggtaaaaggacgcggccatggtgagggtaccttcacgagcgatgtatcaagctacctggaagaacaagcggcgaaagaattcatcgcttggttggtcaaaggacgagggcacggggaggggacgtttacttctgatgtgagctcttacctcgaagaacaagcagctaaggaattcatcgcctggctggtcaagggccggggacatggggaaggaactttcacttcggacgtctcgagctatcttgaagaacaagccgcaaaagagtttatcgcatggctggtgaaaggcagaggacatggagagggcacttttactagcgatgtctcctcttacttggaagagcaagcagcaaaggagttcattgcatggctcgtgaagggcagaggccacggagagggaacttttacttctgacgtgtcctcctaccttgaagagcaggccgctaaagagtttatagcctggctcgtcaaaggaagaggacacggagaagggaccttcacgtcggatgtctcgtcgtatctggaagagcaggcagcaaaggaattcattgcctggcttgtgaagggtcgcggaggaggcgggggaggagggtccggaggagggggcagcggtggcgggggatccgcagaatcaaagtacggacctccctgtcctccgtgtcctgcacctgaagcagcaggtggtccttcagtgtttctgtttccgccaaaaccaaaagacactcttatgatttcacggaccccagaggtcacctgtgtggtggtggatgtctcacaagaagatcccgaagtccagtttaactggtacgtggatggggttgaggtgcataacgcaaagaccaagcccagggaagaacagttcaatagcacctacagagtggtgtcggtgctgaccgtgctgcatcaagactggctgaatggaaaggaatacaaatgtaaagtgtcgaacaagggactcccgagtagcattgaaaagacgattagcaaggcaaagggtcaaccccgagaacctcaagtctacaccctgcctccatcgcaggaggaaatgacgaagaaccaagtgtccctgacttgccttgtgaagggcttttacccatcggacattgccgtggaatgggaaagcaacggacaaccagaaaacaattacaagaccactccacctgtccttgattcagatggatccttttttctttactcgcggttgaccgtggataagtcgcgctggcaagagggtaatgtgttttcgtgctcagtgatgcacgaagcacttcacaaccattacacccagaagagccttagcctgagcctcggt

SEQ ID NO: 15821 - DNA, 1740 bp, synthetic construct
  misc_feature 1..1740: note = source = /note="Description of Artificial Sequence: Synthetic coding sequence"
  source 1..1740: mol_type = other DNA
atgaagtgggtgtcattcatcagcctgctgttcttgttttcgtctgcctactcaggttcactggataagcggcatggtgaaggaacttttacctctgatgtatcgagctacctggaggaacaagctgccaaagaattcatcgcctggttggtcaaggggcgcggacatggtgaggggacgtttacctcagacgtgtcctcgtatctcgaggagcaggctgcgaaagagtttatcgcatggctcgtcaaaggcaggggacacggggagggcaccttcacgtcggacgtttcatcataccttgaggaacaggccgcgaaagaattcattgcatggctggtaaaaggcaggggtcacggagaagggacttttacttctgacgtcagctcctaccttgaggagcaggcggcgaaagagttcatcgcgtggctcgtaaagggacgggggcacggggaaggcacgtttacctcggacgtgagctcatacttggaggagcaggcagcgaaggagtttattgcctggcttgtgaagggtcggggccacggcgaaggaacgttcacctccgacgtgtcgtcgtatcttgaggagcaagctgctaaggagtttatcgcttggcttgtcaagggtcgtggacacggagaaggtacctttaccagcgatgtgtcgtcctacttggaggaacaggcagccaaggagttcatagcatggctggtcaaaggaagaggacacggcgagggtaccttcacctctgacgtctcatcttacttggaagaacaagccgccaaagagttcattgcttggttggtgaagggtcgcggacatggggagggaactttcacttcagatgtgagctcgtacctcgaagagcaggccgccaaggaattcattgcgtggctcgtgaaaggtaggggacatggcgaggggactttcacctcagacgtttctagttatctggaagagcaagccgcaaaggaattcatcgcatggcttgttaagggacgcgggggtggcggtggtggagggtccggaggcggaggaagtggcggcggcggaagcgcagagtcaaagtacggaccgccgtgcccgccgtgccctgcaccggaagctgccggtggacccagcgtgttcctgttcccaccaaagccgaaggacactctcatgatctcccggaccccggaagtcacttgtgtggtggttgacgtgagccaagaggatcctgaagtgcagttcaactggtacgtggacggagtcgaagtgcacaatgcaaagactaagcctagagaagagcagttcaactcgacctaccgcgtcgtgtccgtgctgactgtgctgcatcaggactggctcaatggaaaggaatacaagtgtaaggtcagtaacaaaggactcccgagctccatcgaaaagacgatctcgaaagccaaaggacaacccagagaaccccaagtgtacacccttcctccaagccaggaagaaatgactaagaaccaagtgtccctcacctgcctggtgaaaggcttctacccatcagatatcgcggtggaatgggaatcgaatggacagccagaaaacaactacaagactactccgccggttctggattccgacgggtcgttcttcctctactcgcgcctgacggtggataagtcccggtggcaggagggaaatgtgttttcatgcagcgtgatgcacgaagccctgcataaccactacacccagaagagcctgtccctgtcgctgggg

SEQ ID NO: 15822 - DNA, 1740 bp, synthetic construct
  misc_feature 1..1740: note = source = /note="Description of Artificial Sequence: Synthetic coding sequence"
  source 1..1740: mol_type = other DNA
atgaagtgggtgtcatttatttctctgctgtttctgttctcatccgcgtactccggcagcttggataagaggcacggggagggtacttttaccagcgatgtgagtagctatttggaggaacaagctgctaaggaattcatcgcatggttagtgaaaggccgcggacatggggagggcacttttacatcggacgtctcgtcatatcttgaggagcaggccgctaaagagtttattgcatggctcgtaaagggccggggccatggagaaggaacgttcacaagcgacgttagttcctatctcgaggagcaagctgccaaggagtttatcgcctggctagtcaaaggaaggggccacggcgagggcacattcactagcgacgtaagctcatatttagaggagcaggcggccaaggaatttattgcctggcttgttaagggaaggggccacggcgaaggcacgtttacgagcgatgtcagcagctacctagaggaacaagctgcgaaggaattcatagcctggttagtcaagggacggggtcacggcgaaggcacgttcacgagcgacgtatcaagttatctggaggaacaggccgccaaggaatttatcgcctggctagtgaaagggcgtggccacggcgaagggacattcacctcggacgtgtcttcttacctcgaggagcaggctgccaaggagttcattgcctggcttgtgaaaggtagaggccacggggagggtacattcactagcgacgtgtcctcttacctcgaggagcaagccgctaaagagttcatcgcctggctagtgaaggggcggggacacggagagggtacattcacgagcgacgtctctagctacttggaggaacaggccgcaaaagagttcatagcttggctcgtgaagggcaggggtcacggggaggggacctttacctccgacgtgtcttcttaccttgaggaacaggcagcgaaggagttcatagcctggctggtgaaaggacggggcggtggtgggggaggtggcagcggaggtggcgggagtggtggggggggcagtgctgagagcaagtatggccccccttgcccaccttgtcctgcacctgaggctgcgggcggtccgagcgtgtttctattccctcctaagcccaaggacaccttgatgataagtcgcacccccgaggttacatgtgttgtggtagacgtgagccaggaggaccctgaggtgcagttcaactggtatgtcgacggagtggaagtgcataatgccaaaacaaagccgagagaggagcagttcaattcaacataccgcgtggttagtgtgctgactgtcctgcaccaggattggttaaacggaaaggaatacaagtgtaaggtgtcgaataagggcctacccagttctatagagaagactatctcaaaggcaaaagggcaaccacgggaacctcaggtctacactctgccgccatcccaggaggaaatgacgaagaatcaagtgagtctcacatgtctggtaaaaggcttctaccccagcgacattgccgtggagtgggagagtaacggccagcccgaaaacaactacaagactaccccacctgtgctcgactcagatggaagctttttcttgtattctaggctgaccgttgataaatcacggtggcaggagggtaacgtgttttcttgcagcgtgatgcatgaggctctccacaaccactacacacagaaatcactgtccctgtctctcggc

SEQ ID NO: 15823 - DNA, 1740 bp, synthetic construct
  misc_feature 1..1740: note = source = /note="Description of Artificial Sequence: Synthetic coding sequence"
  source 1..1740: mol_type = other DNA
atgaagtgggtgtcattcatctctttgctgtttctgttcagctccgcatacagcggatcactcgacaaacgccacggcgaaggtacttttacctccgatgtctcgagctatctggaggaacaagccgcgaaagagtttatcgcgtggttggtaaagggtagggggcacggcgagggaaccttcacgtccgacgtgtcctcctaccttgaagagcaggcagccaaggaattcatcgcctggctggtcaaggggcgcggacacggagagggaacttttactagtgacgtgagcagttacttggaagagcaggccgcgaaagagttcatagcatggctcgtcaagggtcggggacacggagagggtacttttacctccgacgtttcctcatacctcgaagaacaagctgcgaaggaattcattgcgtggctcgtgaagggccgtggacacggagagggaaccttcaccagcgacgtttccagttacctcgaggaacaggccgcaaaagaattcattgcatggctggtgaaaggtagagggcacggggagggaacgtttacttcagatgtctcatcttacttggaagagcaagctgctaaggaattcatcgcttggctcgtgaagggaagaggacatggagagggcacgttcacctcggatgtgagctcctaccttgaagaacaggcggccaaggagttcattgcctggctggtgaaaggaagaggccacggggaaggcacctttacttcggatgtgtcgtcgtaccttgaggaacaggctgccaaagagtttatcgcatggcttgtcaagggaaggggacatggagagggcactttcacctccgacgtctcatcctacctggaagaacaagccgcaaaggagttcatcgcatggttggtcaaaggccgcggtcatggggaaggcaccttcacctcggacgtatcttcatacctggaggagcaagccgccaaggaattcatcgcttggcttgttaaggggcgaggaggcggcggagggggcgggagtggcgggggcgggtcgggaggcggtggaagcgctgaatcgaagtacggacctccgtgcccgccatgtccggcacccgaggccgcagggggtccgtccgtgttcctgttcccacccaaaccaaaggacactctgatgatctcgcggactccagaggtgacctgcgtggtggttgacgtgtcccaagaagatcctgaggtccagttcaattggtacgtggatggagtagaagtgcataacgccaaaaccaagccgcgggaagagcagttcaactccacttaccgggtggtgtcagtgctcaccgtgctgcaccaggactggctgaatggtaaggaatacaagtgcaaggtgagcaataaaggacttcctagcagcatcgagaaaacgatctcgaaggcgaaaggacagccgcgcgaacctcaagtgtacaccctgccgccgtcgcaagaagaaatgacgaagaaccaggtgtcgctgacttgtctcgtgaagggtttctacccctccgacatcgcggttgagtgggagtcgaacggtcaacccgaaaacaactacaagactactccaccggtgctggattcagatggatccttcttcctctatagccgcctgaccgtcgacaagagcagatggcaggaaggtaacgtctttagctgctcggtgatgcatgaagccctccacaatcattacacccagaagagcctgtcgctgtcgctggga

SEQ ID NO: 15824 - DNA, 1740 bp, synthetic construct
  misc_feature 1..1740: note = source = /note="Description of Artificial Sequence: Synthetic coding sequence"
  source 1..1740: mol_type = other DNA
atgaagtgggtgtcatttatctcactgctgttcttgtttagctccgcctactcaggatcgttggacaagcgccatggggagggcactttcacgtcagatgtgtcatcgtacttggaagagcaggctgcaaaggaattcattgcctggcttgttaaagggcgcggtcacggtgaagggacttttacgtccgatgtgtcatcgtaccttgaggagcaggcagcgaaggagtttattgcttggttggtcaagggtagaggccacggggaagggacgttcacctcagacgtgtcgtcatacctcgaagagcaagccgccaaggagtttatcgcctggttggtaaaggggaggggtcacggagagggtacctttacctccgatgtctccagctaccttgaggaacaagcagcaaaagaattcatcgcatggctcgtgaagggacgcgggcatggagaaggtacttttactagtgacgttagttcgtacctcgaagaacaagcggcaaaagaattcattgcatggcttgtgaaaggaaggggacatggagagggcacctttacctcggatgtttcctcgtacctggaggaacaagcagcaaaggagttcatagcatggttggtgaaagggcgtggccatggtgagggtacttttacctccgacgtaagttcctaccttgaagagcaggctgcgaaagagtttatagcgtggctcgtaaagggcagaggtcatggagaaggcaccttcaccagcgatgttagcagctacctcgaggaacaggcagccaaggagttcatcgcttggctcgttaaggggcggggacatggtgaaggaactttcaccagtgacgtctcctcgtatctggaagaacaggcagcaaaggagtttattgcttggctggtgaaaggaagaggtcacggagaaggtactttcacgagtgacgtcagcagctatctggaagaacaggccgcgaaggaattcattgcatggctggtcaagggccggggcggaggtggaggcggcggatccggaggaggaggaagcgggggaggaggaagcgcagagagcaaatacggtcctccctgccccccttgtcccgcgcctgaagcagcagggggaccaagcgtctttctctttccacctaagccgaaggacacccttatgatttccagaactccagaagtgacctgtgtggtggtggatgtcagccaagaagatcctgaagtgcagtttaactggtacgtcgatggagtggaagtgcacaacgccaagactaagccacgggaagagcagtttaactcaacctaccgtgtggtgtctgtgctgaccgtccttcaccaggattggctgaatggtaaggagtacaagtgtaaggtgtctaataaggggctgccatcgtcaatcgaaaaaaccatctcgaaagctaagggccaacctcgagagccccaagtgtacactcttccgccgtcccaagaagagatgactaaaaaccaagtctcactgacctgtctggtcaaaggtttttacccttccgacattgcagtggaatgggagagcaacggacaaccagaaaacaattacaagactacccctcctgtgcttgattcagatggatccttttttctgtactccaggcttactgtggataagtcgagatggcaggaaggcaacgtgttttcgtgctccgtcatgcatgaagccctgcataatcattacacgcaaaagagcctctccctttctctgggc

SEQ ID NO: 15825 - DNA, 1740 bp, synthetic construct
  misc_feature 1..1740: note = source = /note="Description of Artificial Sequence: Synthetic coding sequence"
  source 1..1740: mol_type = other DNA
atgaaatgggtgtcttttatctctttattgttcttattctcctccgcatactcagggtctctggacaaacgtcacggtgagggaacttttacttctgatgtgtctagttacctcgaggaacaggcagcaaaggagttcatcgcctggctggtcaagggacgaggccacggcgaaggtacttttacctctgacgtgtcctcctacctggaggaacaagctgccaaggagtttatagcctggctggttaaagggagagggcacggcgaaggcacttttacatccgacgtgtcttcttacctggaggagcaggctgccaaagagtttattgcttggctcgtaaaaggccgcggccacggagaaggaacatttactagtgacgtctcttcctacctcgaagagcaggccgccaaggagtttatcgcctggctggtgaaaggcagaggccatggggagggtacattcacttctgacgtgagctcttatctagaagagcaggctgccaaagagtttattgcatggctggtcaaaggccgaggccatggtgaggggacctttaccagcgacgtgtcatcttacctggaggagcaggctgcaaaagaatttattgcatggctggtgaagggcagaggacatggtgaggggacattcacctccgacgtgagcagttacttagaagaacaggccgccaaggaatttattgcttggctggtgaaaggaagaggccatggggaggggacattcacatccgacgtgagtagttatctagaggaacaggcagcaaaggagtttatagcctggctggtcaagggccgcggccacggagaggggacttttaccagcgacgtctcaagctacttagaggaacaggcagctaaagagtttatcgcatggctagttaagggccgtggccatggcgagggaacctttacaagcgatgtcagttcttacctcgaagagcaggctgccaaggagtttatagcctggttagtaaagggccggggtggaggcgggggcggaggttctgggggagggggatctggcggcgggggctccgctgaatctaaatacggtcctccctgtccaccctgccctgctccagaggccgccggcggaccaagcgttttcttattcccacctaagcccaaggatactctgatgataagcagaacccctgaggtgacctgcgtggtggtcgacgtgagtcaggaagatcccgaggtccaattcaattggtacgtcgatggagtggaagtgcacaatgccaagaccaaaccccgggaggaacagttcaatagtacttatcgggtcgtgagtgtgctgacagtgctgcaccaggattggctcaatggaaaggagtataagtgcaaggtttccaacaaggggctgccaagttccatagagaaaactatttctaaagccaagggccaaccaagggaacctcaggtgtataccctccctccatctcaagaagagatgactaagaatcaggtgagcctgacatgtctggtgaagggcttttatcctagcgacattgctgttgagtgggagagcaacggccaacctgaaaacaactacaagacaaccccccccgtcctagacagtgacggttccttttttctctactctcgtctcaccgtggacaagtctcggtggcaagaaggaaatgttttttcttgttcagtcatgcatgaagcactgcacaaccactatacacagaaatcactatccctatctttgggg

SEQ ID NO: 15826 - DNA, 1740 bp, synthetic construct
  misc_feature 1..1740: note = source = /note="Description of Artificial Sequence: Synthetic coding sequence"
  source 1..1740: mol_type = other DNA
atgaaatgggtgtctttcattagcctcctctttctgttttcgtcggcctactctggctctcttgataaacggcatggcgagggtacttttacgagcgacgtgtcgagttaccttgaggaacaggctgcaaaagaattcattgcatggctggtgaaaggacgtggtcacggtgagggtacctttactagtgacgtgtcatcataccttgaagagcaagccgccaaggaattcatcgcctggcttgttaagggacgtggacatggagaaggcactttcacctcggatgtgtctagctaccttgaagaacaagccgcaaaagagtttatcgcatggcttgtgaagggtcgcggacacggggagggtactttcacgtcagatgtctcatcttacctcgaggaacaagccgctaaggagtttatcgcctggctggtgaagggacgaggccatggcgaaggtacgtttaccagcgacgtgtcctcgtatttggaagaacaggccgcaaaggagttcatcgcttggctggtcaaaggtaggggacacggagagggcaccttcacgtccgatgtctcatcctacctcgaagaacaggcagcaaaggagtttattgcctggctggtaaagggtagaggtcacggggaagggacgttcacctccgatgtatcaagctacctggaagagcaggctgctaaggagttcatagcatggctcgtgaagggaagaggtcatggagaggggacttttacttcagatgtgtcgtcctatctcgaagaacaagcagcaaaggaattcattgcctggttggtaaagggccggggacatggtgagggaaccttcacttccgatgtgtcaagttacttggaagagcaagcagcaaaagagttcatagcgtggcttgtcaagggccgcggtcatggtgaaggcacctttacctccgatgtttcctcgtacctggaggagcaggcggccaaggagttcattgcgtggcttgtgaaaggacggggtgggggcggaggaggtgggtccgggggcggtggctcggggggtgggggatccgcagaaagcaagtatggaccgccttgtccaccttgtcctgcaccagaagcggcaggcggaccaagcgtctttctgtttccccccaagcctaaggataccctgatgatttcgagaaccccggaagtgacttgcgtggtggtggatgtgtcgcaggaggacccagaagtccagtttaactggtacgtggatggtgtcgaggtgcacaatgctaagaccaaacctagagaagaacagtttaactcgacctacagagtggtgtcggtgctcaccgtgcttcatcaagactggctgaacggaaaggagtacaagtgtaaagtgtcgaacaagggtctgccctcgagcattgaaaagaccatctccaaggcaaaaggacaacctcgggaaccccaggtgtacactcttccaccttcccaagaagaaatgacgaagaaccaagttagtcttacttgtctggtcaagggtttttacccgtcagacattgcagttgaatgggaatcaaacggccaacctgagaacaattacaagaccactccacccgtcttggactccgacgggagcttttttctgtactcgaggctgactgtcgataagtcacgatggcaagaaggaaatgtgttttcgtgcagcgtcatgcacgaagcgcttcataatcattacacccagaaatccttgtcgctgagcctgggg

SEQ ID NO: 15827 - DNA, 1422 bp, synthetic construct
  misc_feature 1..1422: note = source = /note="Description of Artificial Sequence: Synthetic coding sequence"
  source 1..1422: mol_type = other DNA
atggccgtgatggctcctcgaacactggtgctgctgctttctggtgcgctggcgttgacccagacgtgggcacaggtgaccctgcgtgaaagtggccctgcgttagttaaacctacacagacactgactctaacatgcacatttagtggctttagtctgagtacaagcggcatgtcagtggggtggatccggcagccccccggaaaggctctggaatggcttgcagatatctggtgggatgataagaaggactataatccctctctgaaatctcgtctgacaatcagtaaggatacaagcaagaaccaggttgtactcaaggtgaccaacatggaccccgctgacaccgccacgtactactgcgccagaagcatgattacaaattggtatttcgacgtatggggagccggtacaactgtgacagtgtcttcagcctctacaaagggcccttcagtcttcccactcgcaccatcttctaagtcgacctcggggggcactgcggccctggggtgtctggtaaaggactacttcccggagcctgtgaccgtgtcctggaattcaggggcactgacctccggcgttcacactttccccgcagtgctacagtcttcagggctgtacagcctgagctcagtcgtgactgtccccagctcttctctggggacacagacgtatatttgcaatgtgaatcataaaccttctaacactaaagtcgataagcgcgtggaaccaaagagttgcgataagacgcacacatgcccaccatgtccagcgcctgagttgttaggaggccccagcgttttcctgttcccccctaagcctaaggacacacttatgatctcacgcacacctgaagtcacctgcgtcgtggtggatgtgagtcatgaagatcctgaagtgaaattcaattggtacgtggatggggtggaagtgcataacgccaagacaaaacctcgtgaggaacaatacaactccacttatagagtagtttctgtgttgactgtgctccatcaagattggctgaacggaaaggagtacaagtgcaaggtttccaacaaagcgctgccggcacctattgaaaaaaccataagtaaagcaaaagggcagcctagagagcctcaagtttacaccctgcctcccagtagggaggaaatgactaagaatcaggtgtctttaacttgtctggtcaaaggattttatccttcagatattgccgtagagtgggagagcaacggccagccagagaacaattataagacgacaccaccggttctcgattccgacggaagtttcttcctttactcgaagctgactgtggacaagagccgatggcaacagggtaacgtgtttagttgtagtgttatgcacgaggccctgcacaaccactatacacagaaaagtctctctttgagtcctggcaag

SEQ ID NO: 15828 - DNA, 1422 bp, synthetic construct
  misc_feature 1..1422: note = source = /note="Description of Artificial Sequence: Synthetic coding sequence"
  source 1..1422: mol_type = other DNA
atggcagtcatggcgccgcgcaccctcgtgctgctgctctccggagctctcgccctgacccagacttgggcccaggtcacgctgcgcgagtccggcccagctctggtgaagccaacccagactctcactctgacgtgcactttcagcgggttttccttgtccacttccggaatgtcagtcggatggatccggcagcctcctggaaaagccctggagtggctcgccgatatctggtgggatgacaagaaggactacaacccgagcctcaaatctcggctgacgatcagcaaggacaccagcaagaaccaggtggtgcttaaagtgaccaacatggacccggctgataccgccacgtactactgcgcgcggagcatgatcactaattggtatttcgacgtgtggggagccggcaccaccgtaaccgtctcgagcgcttccaccaaaggcccatcagtgtttccactcgcaccctccagcaaatcaactagcgggggtaccgctgccttgggctgcctggtgaaggattacttcccagaaccggtcactgtctcctggaattcgggggcacttacctccggtgtgcacactttcccggcagtgctccaatcgtccggactttattctctgagctccgtcgtgaccgtcccttcatcgtcgctgggaacgcagacctacatctgcaacgtgaaccacaagccgtcaaataccaaggtcgataagcgggtcgaaccaaagtcgtgcgacaaaacccatacctgcccgccatgcccggccccggaactgttgggtgggccttccgtgtttctgtttccccccaagcctaaggataccttgatgatctcgaggacgcctgaagtgacgtgcgtggtggttgacgtctcccacgaggaccctgaagtgaagttcaattggtatgtggacggtgtggaagtccacaatgcgaaaaccaagccgagagaggaacagtacaactctacttacagagtggtcagcgtgctcactgttctgcaccaggactggctcaatggaaaagaatacaagtgcaaggtgtccaacaaagccttgccggctcccattgaaaagaccatcagcaaggcaaaaggacagcctcgcgagcctcaggtgtacacgctgccgccgtcccgcgaggaaatgaccaaaaatcaagtgagcctcacttgcctcgtcaagggattttacccctccgatatcgcagtggaatgggaatcaaacggacaaccagagaacaattacaagaccaccccgccagtgctggacagcgatggctcgttcttcctttactcgaaactgaccgtggataagtccagatggcagcagggaaatgtgttctcgtgctcagtgatgcatgaagcccttcacaaccactacacgcagaagtcactttccctctcaccgggaaaa

SEQ ID NO: 15829 - DNA, 1422 bp, synthetic construct
  misc_feature 1..1422: note = source = /note="Description of Artificial Sequence: Synthetic coding sequence"
  source 1..1422: mol_type = other DNA
atggcagtgatggcacctcggacccttgtgcttctgctgtcaggagcgctcgccctgactcaaacttgggcacaggtgaccctgcgcgaatcaggcccagcgctggttaagcctactcagacccttaccctgacttgcaccttctcgggattttcgctttcgacttccggaatgtccgttggatggatcagacagccgccaggaaaggcactggaatggcttgcagatatatggtgggacgacaaaaaagattacaatcccagtcttaaatcgcgtctgactatttccaaggatacctccaagaaccaggtggtgcttaaagtgaccaacatggatcccgcggacaccgccacctactactgcgcaaggagcatgatcaccaactggtactttgatgtgtggggcgcgggaactacggtgaccgtgtcgagcgccagcactaaagggcctagcgtgtttccccttgctcccagctcgaaatcaacctctgggggaaccgctgcgctgggttgcctcgtcaaggactacttccctgagcctgtcaccgtgtcatggaattcaggtgcattgacttctggcgtgcatacttttcctgctgtgctgcaaagctcgggcctttactcactttcgtctgtggtgactgtgccgtctagctcactgggtactcagacctatatctgtaacgtgaaccacaagccatccaacaccaaggtggacaaacgcgtcgaaccaaaaagctgtgataagacccatacctgtccaccgtgtcctgcgcccgaactcttgggtggaccttcggtgtttttgtttccaccgaagcctaaagataccctcatgatctcaagaactcctgaagtgacgtgcgtcgttgtcgatgtgtcgcacgaagatcctgaggtgaaattcaactggtatgtcgatggggtggaggtccacaacgccaagacgaagcctagggaagaacagtacaactccacctacagagtagtgtccgtcctcactgtgttgcatcaagattggcttaacggcaaggaatacaagtgtaaggtgtccaataaggccctgcctgctcctattgaaaagaccatctcaaaagcaaagggacagccacgggaacctcaagtctacaccctgcctccctcacgcgaagagatgactaagaaccaagtctcgcttacctgcctggtgaaagggttttacccttcagatatcgcagtggaatgggaatcgaacggccaaccggaaaacaattacaaaacgactcctccggtactggattccgatggatcttttttcctgtacagcaagctcacggtcgacaagtccaggtggcaacagggaaacgtgtttagctgctcggtcatgcatgaagcacttcataaccattacacccaaaagtccctgtcgctgtcacctggaaag

SEQ ID NO: 15830 - DNA, 1422 bp, synthetic construct
  misc_feature 1..1422: note = source = /note="Description of Artificial Sequence: Synthetic coding sequence"
  source 1..1422: mol_type = other DNA
atggccgtgatggcacccaggacgcttgtactgctgttatctggagccctggcactgactcagacatgggcccaagttaccctgagagagtccggcccagctctggtgaagccgacccagaccctcactctgacctgtactttctcgggcttttctctgtctacctccgggatgagcgtcggttggattcgtcagcctccagggaaagcactcgagtggctcgccgacatatggtgggacgataagaaggactataatccaagccttaagtctcgtttaaccatctctaaagacacgagcaagaaccaggttgtgttgaaggtgacaaatatggaccccgctgacacggccacgtattactgtgcaaggagcatgattacgaattggtatttcgatgtgtggggagcgggaaccacagtgacggtgtctagtgcctccactaagggtccatccgtgttccccctggccccgtcctctaagagtacttccggtggtaccgctgcactaggatgcctcgtgaaggattattttccagaacctgttactgtgtcgtggaatagtggcgctttgacgtccggcgtccatactttccccgcggttcttcagtcctcaggcctatatagtctgtccagcgttgttacagtccccagcagtagtcttggaactcagacatacatttgtaatgtaaaccacaaaccctcaaacaccaaagtggataaaagagtagagccaaaatcatgcgacaagacacacacatgccccccgtgccccgccccagagcttttgggaggccctagtgtcttcctgttccctccaaagcccaaggataccttgatgatctcccgcacacctgaggtaacctgtgtcgtcgtggacgtgagccacgaggacccagaagtcaaattcaattggtacgtcgatggggtagaggtacataacgctaaaaccaaaccacgggaagagcagtacaactctacatacagggttgtgagtgtgctgactgtactccaccaggattggctgaatgggaaggagtacaagtgcaaggtctctaataaagcactcccggcgcctatcgaaaagactattagcaaagccaaggggcaaccccgtgagccccaagtctacacactcccaccgtcaagagaagagatgaccaagaaccaagtgtcactcacttgtcttgtgaaaggtttttatcctagcgatatagctgtggagtgggagtctaacggccagcccgaaaataactataaaaccactcctcctgtgttggatagcgatggcagcttcttcctgtacagcaaactgaccgtagacaaaagtcggtggcagcagggtaatgtttttagctgttccgtgatgcacgaggcccttcataaccattatacccaaaaatccctttcgctgtcaccagggaag

SEQ ID NO: 15831 - DNA, 1422 bp, synthetic construct
  misc_feature 1..1422: note = source = /note="Description of Artificial Sequence: Synthetic coding sequence"
  source 1..1422: mol_type = other DNA
atggccgtaatggcccctcggacattagtgctgttgctgtccggcgcgctagcgctgactcagacttgggctcaggtgacgctaagggaaagtggacccgcccttgtgaaacctactcagacactcactctaacgtgcacattttccggtttttccctgagcacttctggcatgagcgtcggctggatacggcagccacctggcaaagcgcttgagtggctggccgacatttggtgggatgataagaaagactacaacccctctctgaaaagccgcctgacaatttccaaggacactagtaagaatcaggtggtcctgaaagtgaccaacatggacccagccgacaccgccacttattattgtgctaggagcatgatcaccaactggtactttgacgtgtggggcgcaggtacgacagttaccgtaagctctgctagcacaaaaggcccaagtgtattcccactggcacccagcagcaagagcacctccggaggtacggcagcccttggctgtcttgtcaaggattacttcccagagccggttaccgtttcatggaattctggcgccctaacctcgggagttcacacctttccagccgtgcttcagtccagcgggctttattccctctcttccgtggtgacggtaccctcctcctcgctgggaacccaaacttacatctgcaacgttaaccataaaccttctaatactaaggtcgataagcgtgtggaacctaagagttgcgacaaaacgcatacctgccctccatgccccgccccggagctgctgggaggtccttcggtgtttctatttccgcctaaacctaaggacaccctgatgattagtcgtacacctgaggtgacatgtgttgttgttgacgtcagccatgaagatcctgaagtcaaatttaactggtacgtggatggcgtggaagtccataatgctaagaccaaaccacgggaagaacagtataactctacatatcgcgtggttagtgtgctgacggtgctgcaccaggactggcttaacgggaaggagtataagtgtaaggtaagtaataaggcccttcccgcaccaattgaaaaaaccatcagtaaagcaaagggacagcccagagagccccaagtttacactctaccacccagccgagaggaaatgaccaaaaaccaggtgagtctcacgtgcctggtgaaagggttttatccttctgacatcgctgtggaatgggaaagcaacggacagccggagaacaactataagaccacaccaccggtgctggatagcgacgggtcattcttcctatattctaagctcacagtggacaaatcacggtggcagcaggggaacgtgttttcatgcagcgtgatgcatgaggcactccataaccactatacccaaaagagcctcagcctctctccagggaag

SEQ ID NO: 15832 - DNA, 1422 bp, synthetic construct
  misc_feature 1..1422: note = source = /note="Description of Artificial Sequence: Synthetic coding sequence"
  source 1..1422: mol_type = other DNA
atggccgtcatggcacccaggaccctggtccttctgctgtccggtgcactggcattgacccagacttgggcacaggtgactctgcgagagtccgggcccgcattggtgaagcccacgcagacgctgactctgacctgcacgttttcgggattcagcttgtccacttccggaatgagcgtgggttggatacggcaacctcccggaaaggcacttgagtggcttgcagatatttggtgggatgacaagaaggattacaatccttccctgaaaagcagactgacgatatcgaaagacactagtaagaaccaagtggtcctgaaggtcactaatatggatcctgcagatactgcgacttactactgtgcccgcagcatgattacgaactggtactttgatgtatggggcgcggggaccaccgtgactgtgagctcagcgtccaccaagggtccttccgttttcccactggcacctagttctaagtcaacctcaggaggaaccgcagcgctgggatgccttgtgaaggactactttcccgagccagtaaccgtttcgtggaattcaggagcactgaccagcggtgtgcatacttttccagctgtgctgcaatcatcgggcctttacagcttgtcgtcggtggttactgtcccatcctcgtcacttggcacccaaacctacatctgcaacgtgaaccacaaaccgtcgaacactaaggtggataaaagggtggaacctaaatcatgtgacaagacgcatacctgtccgccatgtcccgcccccgaattgctgggaggcccttcggtgttcctcttcccccctaaaccaaaagacaccctgatgattagccggacgcccgaggttacttgtgtcgtggtggatgtgtcccatgaggatcccgaagtcaagtttaactggtacgtcgatggcgtggaggtccacaatgcaaagaccaagcctcgagaagaacagtataactcgacttacagagtagtctctgtgcttactgtgcttcatcaggactggcttaatggcaaggaatacaagtgtaaagtgtccaataaggcccttcctgcacctatcgaaaagactattagcaaggctaagggacagcctagggaacctcaagtgtacacccttcccccttcacgcgaagagatgaccaaaaaccaggtgtccctcacttgccttgtcaaaggattctatccttccgatatagctgtcgaatgggaatcgaacggtcaaccagagaacaattacaagaccactccgccagtacttgattcggacggtagcttttttctgtacagcaaactgactgtggacaagtcgagatggcaacagggaaacgtgttttcatgctccgtcatgcacgaagcactgcataaccattacactcaaaagtcgctctctctctcgcccgggaag

SEQ ID NO: 15833 - DNA, 1422 bp, synthetic construct
  misc_feature 1..1422: note = source = /note="Description of Artificial Sequence: Synthetic coding sequence"
  source 1..1422: mol_type = other DNA
atggccgtgatggcacccaggaccctggtgctcctcttaagtggggctctcgccctgactcagacgtgggcccaggtcactcttcgggaatctggccctgcccttgtgaaaccaactcaaacgcttaccctcacctgtaccttcagcggtttcagcctcagtacgagtggaatgtctgttggatggatcaggcaaccgcccggcaaggctctggagtggctcgccgatatatggtgggacgataagaaagactacaatccctcattgaaatcgcgcctgacgatctcaaaggatacatccaagaatcaggtggtgctcaaggtgactaatatggacccggccgacacggctacatattactgtgccagatctatgatcaccaactggtacttcgatgtgtggggcgccgggaccaccgtgacggtttcctcagcctccacaaaagggccctctgtcttccccctggcgccctcctccaaatctacctcaggcggtacggctgccttgggatgtctggttaaggattacttcccggagcccgtaacagtgagttggaattccggagcgctgacatctggggttcataccttcccagctgtgttacaatcttctggactgtattctttgtctagcgtcgtgacggttccgtcatccagcctgggaacacaaacgtacatttgcaatgttaatcacaagccgtctaatactaaagtcgacaagcgcgttgagccaaagtcctgtgacaagacacacacatgtccaccatgcccggcccctgagttgttaggcgggcctagcgtcttcctatttcctcccaagcctaaggatacgctcatgatctctcgaacccccgaagtgacctgcgtcgtggtggatgtcagtcatgaggaccccgaggtgaagtttaactggtatgtggacggcgtggaagtacataatgccaagactaagcctagagaagagcagtacaatagcacctaccgcgtagtatcagtccttacagtgctacaccaggactggctgaacggaaaagagtacaaatgtaaggtctctaacaaagcccttcccgcgcccatcgaaaagaccatctccaaagccaaaggtcagccccgagagccccaggtatataccctgcctccaagccgcgaggagatgaccaagaaccaggtatcactgacttgtctcgtgaaggggttttatccgagcgacatcgccgtcgaatgggagagtaatggacagccagagaataattacaaaacgacgcccccagtgctggacagtgacgggtctttcttcctgtattctaaactcaccgtcgacaaatcccgatggcagcagggaaacgtgtttagctgctcagtgatgcacgaagctctgcataaccactacacccagaaatccctgtcgctcagtcctggaaaa

SEQ ID NO: 15834 - DNA, 1422 bp, synthetic construct
  misc_feature 1..1422: note = source = /note="Description of Artificial Sequence: Synthetic coding sequence"
  source 1..1422: mol_type = other DNA
atggctgtcatggcacctagaaccctcgtgctcttacttagcggagcgcttgcactgactcaaacatgggctcaggttacactgagggagagcggccccgctctggttaagcccactcaaactctcacactgacatgtacctttagcggcttttctttgagcacctcgggcatgagcgtgggctggatcagacaacctccgggtaaagctctggagtggctggccgacatttggtgggacgataagaaggattataatccaagcttgaaaagtaggctaaccatctcaaaggacactagcaaaaaccaggtggtgctgaaagtgacgaatatggatccggccgatacagccacttactactgcgcaaggagcatgatcactaattggtatttcgatgtctggggcgctggcacaaccgtgaccgtcagcagcgccagcacaaaaggcccgtctgtctttcctctggccccgagcagtaagagcaccagcggcggaacagctgctcttggatgtctcgtgaaagattattttccagaacccgtgaccgtgtcttggaacagcggcgccctgaccagcggagtgcatactttccctgcggtactgcagagctcaggcctgtactcactttcatcagtagtgacagtgccatctagctcactgggcacacaaacgtatatttgcaatgtcaaccacaaaccaagcaacactaaggtcgacaaaagagtcgaacctaagagctgcgacaaaacccatacatgtcctccttgtccagctccggagctcctgggcgggccctccgtgtttcttttcccacctaaacctaaagatactctgatgatctccagaaccccggaggtgacttgtgtagtggtcgatgtcagccacgaagatcctgaggtaaagtttaactggtatgtggatggagtggaagtgcacaatgcaaagaccaaacctagagaagagcaatataactctacttacagggtggtttctgtcttgaccgtgttgcatcaggactggctcaacggaaaagaatacaaatgcaaagtctcaaataaggccctgcccgccccaatcgaaaaaacaatctcaaaggcaaagggacaaccaagagaaccacaggtctatactctgccgcccagcagggaagaaatgaccaagaaccaggtaagcctcacctgtctggtaaaaggcttctatcccagcgacatcgctgtcgagtgggagagcaatggtcaacctgagaataactacaaaactacccctcccgtgttggatagcgatggcagcttcttcctgtatagcaagctcaccgtggacaaaagcagatggcagcagggaaacgtctttagttgcagcgtcatgcacgaggctcttcacaaccactacacccagaagagcttgtctctcagcccaggcaaa

SEQ ID NO: 15835 - DNA, 1422 bp, synthetic construct
  misc_feature 1..1422: note = source = /note="Description of Artificial Sequence: Synthetic coding sequence"
  source 1..1422: mol_type = other DNA
atggctgtaatggccccaagaactctggtgctgctcctgtccggagctttagcacttacccagacttgggcacaggtcacccttcgtgagtctggtcccgccctggtgaagcctacccagaccctgacactcacctgcacattctcaggcttctcactgagcacctccggaatgtcagtgggctggatcaggcaacccccaggtaaagctctggaatggctggccgacatttggtgggatgacaagaaagattacaatccatcgctcaagagtaggctgacgatcagtaaggatacctcaaagaatcaggtcgttctaaaggtcactaatatggatcccgcagacacagcaacctactactgtgctaggtctatgataacaaattggtattttgatgtatggggagccggaacgacagtaacggtgtcaagtgcctctacgaaaggacctagtgtgttcccactggcacccagctccaagagcactagcgggggcacagccgcccttggatgcctggtgaaggactattttccagaaccagttaccgtatcctggaatagcggtgccctaacaagtggcgtgcacacattccccgcggtactgcagagctctggattgtatagtctgtcatccgtcgtcacagtgccaagcagctccctgggcacccagacgtatatctgcaacgtcaaccacaagccaagcaataccaaagttgacaagagagtagagcccaaatcctgtgataaaacacatacttgccccccctgtccagcaccggaactgttgggagggcccagcgtgttcctctttccacccaaaccaaaagataccctgatgatttcccgcactcctgaggtgacctgtgtggtcgtggatgtgagccatgaagatcccgaggtcaagttcaactggtatgtggatggcgtagaggttcataatgccaagacaaagccgcgcgaggagcaatacaacagcacctacagagtggtcagtgtgcttactgtgctgcatcaggactggctcaacggcaaggaatacaaatgtaaagtgtcaaacaaggccttgcccgcacccattgagaaaacaatctctaaagctaaaggccagccgagggaaccgcaggtgtataccctgcctccgagtcgtgaagaaatgacgaaaaatcaagtgagcttaacctgcctcgtcaagggattctatccctccgatattgccgtcgagtgggagagcaatggacagccggaaaacaattacaagacaaccccacccgttcttgacagcgatggaagcttcttcctgtattcaaagctgacagtcgataagagcagatggcagcaggggaacgtgttcagctgttcagtgatgcatgaggccctacataaccactatacccagaaaagtcttagcctgtcgcccggcaag

SEQ ID NO: 15836 - DNA, 1422 bp, synthetic construct
  misc_feature 1..1422: note = source = /note="Description of Artificial Sequence: Synthetic coding sequence"
  source 1..1422: mol_type = other DNA
atggcagtgatggccccgagaaccctggtcctgctcctctcgggcgcgcttgcactgacccaaacctgggcacaagtgactctccgcgaaagcggaccagcacttgtgaaaccaactcagacccttactcttacttgtactttttcagggttttccctcagcacctcgggaatgtcggtcggatggattcgacaaccacctgggaaggcactcgagtggctggccgatatttggtgggatgataagaaggactacaacccctcactcaagtcacggcttacgatttccaaggatacgtcaaaaaaccaagtcgtgctcaaagtgaccaacatggatccagccgataccgcaacctactactgcgcacggtcaatgatcaccaactggtactttgatgtgtggggagctggaaccactgttaccgtgtcgtccgcctcgaccaagggacctagcgtgtttccccttgccccaagctccaagagcacttcaggtggtactgccgcccttgggtgtctggtgaaagattacttccctgaacccgtgaccgtcagctggaatagcggagcactcacttcgggcgtccacaccttcccagcagtccttcagtcgtcggggttgtactcgctgtcatccgttgtcacggtgccatcgtcgagcctggggacccagacttacatttgtaatgtgaatcacaagccttcgaacactaaggtcgataaacgcgtcgaaccaaaaagctgtgacaagacccacacctgcccaccatgtccggcacctgagctgcttggcggaccttccgtgtttctttttcccccgaagccaaaggatactcttatgatctccaggactcctgaggtgacctgtgtggttgttgacgtgtcccatgaagatcctgaggtcaagtttaactggtacgtggacggggttgaagtccacaacgcaaagacgaaacccagagaggaacagtacaacagcacttaccgcgtggtgtccgtgctcactgtcctccaccaagattggcttaacggtaaggaatacaagtgtaaggtttcaaataaggccctgccagcgcctattgaaaagaccatatccaaagctaagggtcaaccccgggaacctcaggtgtacacccttccaccctcgcgggaggaaatgaccaaaaaccaggtgtccctcacgtgcctcgtcaaggggttttacccttcggatattgccgtggagtgggaatccaacggccaaccagagaataactacaaaaccacccctcctgtccttgattccgacggtagctttttcttgtactcaaagctgactgtggacaagtcccggtggcaacaaggtaacgtgttctcctgtagcgtgatgcatgaagcactgcacaaccactacacccaaaagtcccttagcctgtcaccaggcaaa

SEQ ID NO: 15837 - DNA, 1422 bp, synthetic construct
  misc_feature 1..1422: note = source = /note="Description of Artificial Sequence: Synthetic coding sequence"
  source 1..1422: mol_type = other DNA
atggcggtgatggcaccgcgtaccctcgtccttctgctgagcggagcattggcacttacccagacctgggcccaagtgaccctgcgggagtcaggaccagcacttgtcaagcctacccaaactctgaccctgacctgtaccttctccggtttttcgttgtccacctcaggcatgtcggtcgggtggattcgccaacccccaggcaaagccctggaatggttggccgatatatggtgggatgataagaaggactataatccgtcacttaagtcgcggctcaccattagcaaagacacgagcaagaatcaggtggttcttaaggtcaccaatatggaccctgccgacactgcgacgtactactgtgcaagaagcatgattactaattggtactttgatgtctggggggccggaacgaccgtgaccgtgtcctccgcgagcaccaagggcccctcagtgttcccactcgcaccttcaagcaagtccacctccgggggaactgcagccctgggttgcctggtcaaagattacttccctgagccagtgacggtgagctggaactccggagcgctcacttcaggggtgcataccttccccgcagtgcttcaatcatccggtctttactcgttgtcgagcgtcgtcaccgtgccaagttcttcgctgggaactcagacttacatttgcaatgtgaaccataagccatcaaacacgaaggttgataagcgcgtggaacctaagagctgtgataagacccatacctgtccgccttgtccagcgccagaactcctgggaggtcctagcgtgtttctgtttcccccaaaaccaaaggataccctgatgatctccaggacccccgaggtgacttgtgtggtcgtcgatgtctcccacgaagatcctgaagtgaagtttaactggtacgttgatggtgtggaagttcataacgccaagaccaagccgagagaagaacaatacaactccacctacagagtcgtgtccgtgctgactgtgctgcaccaagactggctgaacggaaaggaatacaagtgtaaagtgagcaacaaggcattgcctgcacctattgaaaagaccatctcgaaggcaaaaggccagcctcgtgaaccccaggtgtacaccctgcctccatcgagggaagagatgacgaaaaatcaagtgtcactcacttgccttgtgaagggtttttaccccagcgatatagcagtagaatgggaatcaaatggtcaacctgagaataactacaaaactactccccctgtgctggactcggatggatcttttttcctttacagcaaattgaccgttgacaaatccaggtggcagcaaggcaacgtctttagctgctcggtgatgcatgaagccttgcataaccattacactcagaagtcgctgtcgctgtcccctggaaaa

SEQ ID NO: 15838 - DNA, 1422 bp, synthetic construct
  misc_feature 1..1422: note = source = /note="Description of Artificial Sequence: Synthetic coding sequence"
  source 1..1422: mol_type = other DNA
atggcagtcatggcacctagaactctggtgctgcttctgagcggagctctcgccctgacacagacttgggcgcaggtgacactcagagagagtggtccggccctggttaagcctacgcaaacactgacactgacctgcacattctcgggtttcagcctcagcacgtcagggatgtccgtgggctggattcgccagcccccaggcaaagccctagagtggcttgccgatatctggtgggatgataagaaggactacaacccaagtctcaagtcccgactcactataagcaaggatacaagcaaaaatcaggttgtcctgaaggtgacaaatatggaccctgccgacaccgcaacatactactgcgcccgctcaatgattacaaattggtacttcgacgtctggggtgcaggaacaaccgtgactgtgagctccgcctccactaagggccccagcgtgtttcccctggccccgtctagtaagagcacctctggcggcacggcggccctcggatgccttgtgaaagactacttccccgagcctgttacggttagttggaattctggggcccttaccagtggagttcacacatttcccgccgtgctccaatcctccgggctgtacagtctcagttccgtcgtaactgtcccctctagttccctcggaacacagacctacatatgtaatgtgaaccataagccgagtaacaccaaagtcgacaagagggtggaaccgaagagctgcgacaagacgcatacatgtccaccttgtccggcacccgagctgctgggaggaccttcggtctttctgtttcctccgaagcctaaagacacattaatgatatcacgcacccccgaggtaacttgcgtagttgtggatgtttcgcacgaagaccctgaggtgaaattcaactggtacgtggatggtgtggaagtacacaatgccaaaaccaagccgcgtgaggagcagtataacagcacttatagggtggttagcgttctaacagttttgcaccaagactggctgaatggcaaagagtataaatgcaaagtatccaacaaagccctgcccgcacctatcgagaagacaatctctaaggctaaaggacagccgcgcgaaccgcaggtgtataccctgcctccgtctagagaggagatgaccaaaaaccaggtatcccttacctgcctcgtcaagggcttctatcctagcgacatagcggttgaatgggagagcaatggccaaccggagaacaactataagactacccccccagtcctggattccgacggaagcttttttctatattccaagcttaccgtcgacaaaagccgatggcaacaaggcaacgtcttttcgtgtagtgtcatgcacgaggccctccacaatcattacacccagaaatccttgagcttatccccgggtaag

SEQ ID NO: 15839 - DNA, 1422 bp, synthetic construct
  misc_feature 1..1422: note = source = /note="Description of Artificial Sequence: Synthetic coding sequence"
  source 1..1422: mol_type = other DNA
atggcagtcatggcacctaggactctcgtcctgctgctcagcggggcattggcacttacccaaacttgggcccaggtgactcttcgcgaatccgggccggccctcgtcaagccaacccaaacccttacccttacttgcactttttcaggtttttccctgtcaacttccggtatgtcggtcggttggattaggcagcctcctggcaaggcacttgaatggcttgcggacatttggtgggatgataagaaagattacaatccatccttgaagagccgcctgactatatccaaggatactagcaagaatcaagtggtgctgaaggtgaccaatatggatccagcagacaccgcaacttactactgtgcaaggtcaatgatcactaattggtacttcgacgtttggggagcagggactactgtgacggtttcgtcggcgtcgactaaagggccatcggtctttccactggccccgtcctccaaatcaacttcgggtggtaccgccgcactggggtgcctggttaaggattactttcctgaaccagtgacggtgtcgtggaacagcggtgcactgacctcaggcgtgcacacgttccctgctgtgctgcagtcctctgggctctattccctgtcgagcgtcgtgactgtcccctcatcgtcgctgggaacccaaacctatatctgtaatgtcaaccataagccatcaaatactaaggtggacaagcgagtcgagccaaagtcatgtgataagacccatacctgcccgccatgcccagcaccagagctcctcggaggtccttcggtgtttctgttcccacccaaacctaaagatacgcttatgatttccagaactcctgaggtgacctgtgtcgtggtggacgttagccacgaggaccccgaagtcaagttcaattggtacgtggatggcgtggaagtgcataacgcaaaaactaagccacgagaagaacagtacaattccacttaccgggtagtgtcagtccttaccgtgcttcatcaagattggctgaacggtaaagagtacaagtgtaaagtctcgaacaaagctcttccagcacctatcgaaaagactatctcgaaggccaaggggcaaccgcgggaacctcaggtgtacactcttcctccgagtcgggaggagatgaccaaaaatcaagtcagtctcacgtgtcttgtgaagggattttacccttcagacatcgcagtcgaatgggaatcaaacggccaacctgagaacaactacaaaacgacgccccctgtgctggattctgatggttcgtttttcctttactcgaaactgactgtggataaatcacggtggcagcaaggtaacgtcttttcctgttccgtgatgcatgaagccctccataatcactacacccaaaagagcctgtcgctttcgccagggaaa

SEQ ID NO: 15840 - DNA, 1422 bp, synthetic construct
  misc_feature 1..1422: note = source = /note="Description of Artificial Sequence: Synthetic coding sequence"
  source 1..1422: mol_type = other DNA
atggccgtcatggctccaaggacgctcgtcttactgctctccggggcattggctctgactcagacttgggcccaggttacccttagagagagtggcccagcactcgtaaaacccacacagactcttacattgacctgtaccttttcaggattttcactcagtacatcagggatgtctgtcggttggatacggcagcctcccggtaaagcactcgaatggctcgcagacatttggtgggatgataaaaaggactacaacccttctctcaagtccaggctgaccatcagcaaagacactagcaaaaaccaggtggtcctcaaggttaccaacatggaccctgcagatacggcaacctactactgtgcccggagcatgattaccaattggtacttcgacgtttggggggccggtacgacagtgacagtgtctagtgcctccacaaagggcccctcagtttttcccctggcacctagcagtaagagcacttccggtgggaccgctgccctcggatgtctcgtgaaggactacttccctgagccagttaccgttagctggaacagtggagccctgacctcaggagtgcatacctttccggcagtgctacagtctagcgggctctattcactgtcttcggtagttactgtcccaagcagttctctgggaactcagacctatatttgtaacgttaatcataaacctagtaacaccaaagtcgataagagggttgagcctaaatcatgcgacaagactcacacatgtccaccgtgtccagctcccgagcttctaggcgggccgagcgttttcctgttcccccccaagccaaaagacacccttatgatctcaagaacacccgaagtgacctgtgtggtggtagacgtgagccatgaggacccagaggtgaaattcaactggtacgttgacggggttgaagtacataatgcgaagaccaagcctcgagaggagcagtataatagtacctatcgcgttgtctctgtgttgacagtgttgcaccaggactggcttaacgggaaagaatacaagtgcaaggtgagcaacaaagcgctgcctgcgcccatagagaagacaatcagcaaggcgaaagggcagccccgagagccccaagtctatactctgcctccatctcgcgaggaaatgacaaagaatcaagtgagtctgacttgtcttgtaaaaggattctaccccagcgatattgcagtcgaatgggagagcaacggtcaaccagagaataattacaagaccactccgccggtactggattcagatggcagcttctttctatactctaagctcaccgtggataagtccaggtggcagcaaggtaacgtgttttcatgtagcgtgatgcatgaggcattgcacaatcattacacccaaaaaagcctcagtctttctcctggcaaa

SEQ ID NO: 15841 - DNA, 1422 bp, synthetic construct
  misc_feature 1..1422: note = source = /note="Description of Artificial Sequence: Synthetic coding sequence"
  source 1..1422: mol_type = other DNA
atggccgtaatggcccctcggacccttgtgctcctgctctctggggccctggcgctgacgcagacttgggcccaggttactctgcgcgagagcggtccagcgttggtgaagcccacccagacattgaccctgacctgcacttttagcggtttttccctctctacatccgggatgtctgtcggctggatccggcaacccccagggaaagctctcgaatggttggcggacatctggtgggatgataaaaaggattacaacccctcactaaaatctcgcctgacaatctcaaaggatacctccaagaatcaggtagtattgaaagtgaccaacatggaccccgctgatacagctacatattactgcgctagatctatgattactaattggtactttgatgtgtggggtgcaggaaccactgtgacagtaagctcagccagcacaaagggaccctctgtatttcccctcgccccgtctagcaaatccaccagcggcggcaccgcagccttaggatgtctggtgaaggactactttccagagcctgttactgtctcctggaattccggagccctgacttcgggagtgcacaccttccctgcagtcctgcagtcaagcggcctgtattcactttccagtgtggtgaccgtgccttcttcatcccttggcacacagacgtacatttgtaacgtgaaccataagccctccaacacaaaagtagataaaagagttgagcccaagagctgcgacaagacccacacatgcccgccatgtcccgcacccgagttgctgggtgggcctagtgtgtttctctttccaccaaagccaaaggacaccctcatgatcagccgcacacccgaggtaacctgcgtggtggttgacgtgtcccatgaggatccagaggtgaaatttaattggtatgtcgacggggttgaggtgcacaatgccaagactaaacctcgagaggaacaatacaacagtacatatcgggtagtgagtgtactgacagtattgcatcaagactggctcaacgggaaggaatacaagtgtaaggtcagcaataaggctttacccgctcctatagagaagaccatctctaaagcgaaaggacagccaagagaaccccaggtatacaccctgcccccatccagggaagagatgactaaaaaccaagtgagtttaacttgcctcgttaaaggcttttaccccagtgatatcgcagtagagtgggaatcaaacgggcagccagaaaacaactacaagactaccccccccgtgctggacagcgacgggagcttttttctttactctaagctgacagtggacaagtcacggtggcagcaaggtaacgtattctcatgtagcgtgatgcatgaggcccttcataaccactacacacaaaagagcctcagcctgtcacctggaaag

SEQ ID NO: 15842 - DNA, 1422 bp, synthetic construct
  misc_feature 1..1422: note = source = /note="Description of Artificial Sequence: Synthetic coding sequence"
  source 1..1422: mol_type = other DNA
atggccgtcatggcaccgagaaccctggtcctgctgctttctggagcactggccttgacccagacctgggcacaggtgactcttcgcgagtctggaccagccctggtgaagccgactcaaactctgaccttgacttgtactttctcaggattttcgctctcaacctcgggcatgtcagttggttggatccgccagccacctggaaaagcgttggaatggcttgcggacatttggtgggacgacaagaaggattacaacccatcactcaagtccagacttactatctctaaggacacttcgaaaaaccaggtggtgctgaaggtgactaacatggatccggccgacactgctacttactactgcgcacgctcgatgatcaccaactggtacttcgacgtctggggagctggtaccaccgtgactgtgtcctcagcctcaaccaagggaccgagcgtctttccgctggcgcctagctccaagtcgacttcaggcggcaccgccgcactgggttgtctcgtcaaggattacttcccggaacctgtgactgtgagctggaacagcggcgcgctcacgtccggcgtgcataccttcccggccgtccttcagtcaagcggtctgtactcactctcctccgtggtgacggtgccctcttcttccctgggcactcagacctacatctgcaatgtgaatcacaagccatcaaacaccaaggtggataagcgcgtggagcccaagtcgtgcgacaaaacccacacgtgtccgccgtgcccagcccctgaactgctgggcggcccgagcgtgttcctcttccctcccaaaccgaaggacactctgatgatcagccggactccagaggttacttgcgtggttgtcgatgtcagccacgaagatccagaagtcaagtttaactggtacgttgatggcgtcgaagtccataatgccaagaccaaaccgcgggaggaacagtacaatagcacctaccgcgtcgtgtccgtcctgactgtgctgcaccaggactggttgaatgggaaggagtacaagtgcaaggtgagcaacaaggcactgccagcaccgattgaaaaaacgatcagtaaggccaaaggccagccccgagagcctcaggtgtataccctgccgccgtccagggaggagatgaccaagaaccaagtgtcactgacctgcctggtgaagggcttctacccatcagacatcgctgtggagtgggagtcgaacggacagcctgaaaacaactacaagaccaccccgccggtgctcgactcagatggctcattcttcttgtactcaaagctcaccgtcgacaaatcgcgctggcaacagggcaatgttttcagctgcagcgtgatgcatgaagcgctccacaatcactacacccagaagtcgctgtccctctcgccaggaaag

SEQ ID NO: 15843 - DNA, 1422 bp, synthetic construct
  misc_feature 1..1422: note = source = /note="Description of Artificial Sequence: Synthetic coding sequence"
  source 1..1422: mol_type = other DNA
atggctgtcatggctcctcggacgttggttcttcttctgtctggtgcgcttgcactgacgcagacttgggctcaagtgaccttgagagagagcggacctgccctggtgaaaccgacacagacactgacattaacttgcaccttttcgggcttttcactaagcactagtggtatgtcagtcgggtggatcagacaaccccccggaaaggcactggaatggctcgctgatatttggtgggatgacaaaaaggattataaccccagcctcaaatccagactcacgatctcaaaggacaccagtaagaaccaagtggtgttgaaagtcaccaatatggatcccgccgataccgctacatattattgcgcccgttccatgattaccaactggtacttcgatgtgtggggggccgggacaaccgtcacggtaagttccgcgagcacaaaaggcccatcagtcttcccacttgccccctcatctaaatccacaagcggcgggaccgcggctttgggctgcctcgtgaaagactatttccccgagccagtgaccgtgtcatggaactctggggcactgacatctggggtgcacacctttcccgccgttctgcagtcgagcggattatatagtctgtcatccgtcgtaacagtccccagtagttcccttgggacacagacatacatttgcaacgttaatcataagccctctaatacaaaagtagacaaaagggtagaaccaaaatcgtgtgacaaaactcatacgtgtccgccctgccctgcccctgaacttctcggtggaccctctgtgtttctgttcccgcccaagccaaaagatactttgatgatttcccggaccccagaggtaacttgtgtcgtggtcgatgtgtctcatgaagatcctgaagttaaatttaactggtatgtcgacggggtggaggtgcacaatgctaagaccaagcccagagaggaacagtataattccacttacagggtagtcagtgttctgacagtgctccatcaagattggctgaacggaaaggaatataagtgcaaagtcagtaacaaggctttgcctgcccctatcgagaagacaatctccaaagccaaaggccagcctagggaacctcaagtgtatacactccctccgagcagagaggaaatgaccaaaaatcaggtgtctctgacatgcctggtcaagggattctatccaagcgacattgccgttgagtgggagtctaatggccaaccagagaacaattacaagaccacaccccccgtccttgattcagacggcagttttttcctgtacagcaaattgacggttgataagtcaaggtggcagcaggggaatgtgttctcatgtagcgtgatgcacgaagctttgcacaatcactacactcagaagtctctgagtctctcccccgggaaa

SEQ ID NO: 15844 - DNA, 1422 bp, synthetic construct
  misc_feature 1..1422: note = source = /note="Description of Artificial Sequence: Synthetic coding sequence"
  source 1..1422: mol_type = other DNA
atggcagtgatggcgccaaggaccctggtgctgttgctgagtggcgccctggccctgacccaaacgtgggctcaggtgaccctgcgcgagtccggacccgctctggtcaaaccgactcagacgctcaccctgacctgtaccttttcgggcttctcgctgtcgacctccgggatgagcgtgggatggatccgccagccaccgggcaaggccctcgagtggctcgctgacatctggtgggatgacaagaaggattataacccctcgcttaagtccagactgactattagcaaggatacttccaagaatcaagtggtgctcaaagtgaccaatatggacccggccgacaccgcaacctactactgcgcccgatcgatgatcactaactggtacttcgatgtctggggagccggaactaccgtcactgtctcttcagcgtccactaagggaccctcggtgttcccgcttgccccgtcgagcaagtcgacctcgggcggaaccgccgcgctcggatgcctggtgaaagattatttcccggagcccgttactgtgagctggaattccggagcgctgacttcgggcgtgcatacgttccctgccgtgctccagagctccggcctctactcactgtcatcggtggtgactgttccgtcctcgtcactcggaacgcaaacctacatctgcaacgtgaaccacaaaccgtcaaacactaaagtggacaagcgggtggaacctaaaagctgcgacaagactcatacctgtccaccttgcccagccccggaactgctgggtggtccttccgtgttcttgttccctcccaagccgaaggacaccctcatgatcagcaggactccggaagtgacctgcgttgtggtcgacgtctcccacgaggatccagaagtgaagtttaattggtacgtggatggggtcgaggtccacaacgctaagaccaaaccgcgcgaggaacaatacaacagcacttaccgggtcgtctcagtcctgacggtcctgcatcaggactggctgaatggcaaggagtacaagtgcaaggtgagcaacaaggcgcttccagcacctatcgaaaagacgatttccaaggcgaagggacagccgcgcgaaccacaagtctacactttgccgccttctcgggaagaaatgactaagaatcaggtgtcccttacctgcttggtgaaagggttctacccgtcggacatcgcagtggaatgggagtccaacggacagccagaaaacaactacaaaactaccccgccagtgctggatagcgacggttcattctttctctacagcaaactcaccgtagacaagagcagatggcagcagggaaatgtcttttcgtgttccgtgatgcatgaggcactgcacaaccactacactcaaaaatcactttcactgtcaccagggaag

SEQ ID NO: 15845 - DNA, 1422 bp, synthetic construct
  misc_feature 1..1422: note = source = /note="Description of Artificial Sequence: Synthetic coding sequence"
  source 1..1422: mol_type = other DNA
atggcggttatggcccctagaaccttggttctattgctctccggcgctcttgccctgactcaaacatgggctcaagttaccctccgcgagtccggccccgctcttgtgaagcccactcagacacttacactgacctgcacttttagtgggttcagcctgagcacgtccggaatgtcagtggggtggataagacagccaccaggaaaagctttggagtggctggccgatatttggtgggatgacaagaaggattacaatccaagtctgaagtcaaggctcactattagtaaggataccagcaagaaccaagtagttcttaaggtgaccaacatggatcccgccgacacagctacctactattgcgctcgaagcatgattaccaactggtacttcgacgtgtggggagccgggaccactgtaacggtcagcagcgcatctacaaaaggccccagcgtgtttccactcgcaccttccagtaagtctacatctggcggcaccgcagcgttgggctgcttagttaaggattacttccctgaaccggtcaccgttagttggaacagtggagcattgacctcgggagtacatacatttcctgcagtcttgcaatctagcggcctgtatagtttaagttcagttgtgaccgtgcccagtagctcgcttggtacacagacttacatctgcaacgtgaaccataagcccagcaatactaaggtggacaagagggtggagccgaaaagttgcgataagacacatacttgtccaccatgtcccgcaccagagctgttggggggtcccagcgtgtttctcttccccccaaagccaaaagatactctgatgatttccaggacgcctgaggttacatgcgtagtcgtagatgtgtcccacgaggaccctgaagtcaaattcaactggtatgtcgatggagtggaagtgcacaatgccaagaccaagcctcgggaagaacaatataactctacatatcgcgtggtctcagttctcaccgtgttgcaccaggactggctgaatgggaaggaatataaatgtaaggtgtccaacaaggcactccccgctccaatcgaaaagactattagtaaagccaagggtcagccccgcgagccacaggtttacaccctcccaccctctcgtgaggaaatgaccaaaaatcaggtgagtctcacttgtctggtcaaaggcttttaccccagtgacattgccgtcgaatgggagtctaatggtcagccggagaacaattataaaactacacctccggtcctggattctgacggctcctttttcctgtattcgaagctgaccgtggataagtccaggtggcagcaaggaaacgtgtttagttgtagcgtcatgcatgaggcgctgcataatcactacactcagaaatccctgtccctttcccccggcaaa

SEQ ID NO: 15846 - DNA, 1422 bp, synthetic construct
  misc_feature 1..1422: note = source = /note="Description of Artificial Sequence: Synthetic coding sequence"
  source 1..1422: mol_type = other DNA
atggctgtgatggcgccgcgtacacttgtactgctgctgtctggcgctttggctctcacccagacatgggctcaggttaccctccgggaatccggtcccgcactagtgaaacctacccaaacgttgaccctaacgtgtactttttcaggtttctcactctccacatctggcatgagtgtggggtggatacgacagccaccgggcaaggctcttgagtggttggcagatatctggtgggacgacaaaaaagattacaacccaagcctcaagtcccgcctcacgatttccaaggatacctcgaagaaccaggttgttctcaaggtcacgaacatggacccagctgatactgctacatactactgcgccaggtcaatgattacaaactggtacttcgacgtctggggtgcaggcacgactgtcacggtcagctctgcgagcacgaagggaccttcagtgttcccgttggctccatctagtaaaagtactagtggtgggaccgctgcacttggctgcctagtgaaggattacttccccgaacccgttaccgtcagttggaactccggcgctctgacaagcggcgtacatacatttcctgcggttctgcagagttctggtctttactccctcagctccgtggtgactgtgccgtctagttccctcggaacccagacgtatatttgtaatgtcaaccataagcccagtaatactaaggtcgacaagcgggtcgaacctaagagctgtgacaagacccatacatgtcctccatgcccagctcccgagctgttgggcggaccctcggttttcttgttcccaccaaaaccgaaggataccttgatgatctctcgcacacctgaggtcacttgcgtcgtcgtggacgtgtcccatgaagatcccgaggttaagttcaactggtatgttgatggtgttgaggtgcataatgctaagacaaagccccgtgaagagcagtataactccacataccgagttgtgtccgtcttaaccgtactacaccaagattggctcaacggaaaggagtacaagtgcaaagtgagcaacaaagctctgcctgcgcctatcgagaaaactatttccaaggctaagggtcagccccgggaaccccaagtctatacattgcccccatctcgagaggagatgacaaagaaccaggtctctctcacatgtcttgttaaaggattctaccctagcgacatagctgtggagtgggagtccaacggccagcctgagaataattataagacgactccccctgttttggatagtgacgggtccttcttcctatatagcaagctcactgttgacaaatctcgctggcaacagggtaatgttttctcttgttccgtaatgcatgaagcgttgcacaatcactacactcagaagagcctgtctttgagccctggaaag

SEQ ID NO: 15847 - DNA, 1422 bp, synthetic construct
  misc_feature 1..1422: note = source = /note="Description of Artificial Sequence: Synthetic coding sequence"
  source 1..1422: mol_type = other DNA
atggcagtgatggctcctagaactctggtgctgctcctgagcggagccctcgcactcactcaaacctgggcacaggtgacgctgagggaatcgggacctgccctcgtgaagcctactcaaactctcaccctcacctgcaccttttccgggttttcccttagcacgtccggcatgtccgtggggtggataagacaaccccctggcaaagccctcgaatggttggctgacatatggtgggacgacaagaaagattacaacccatcgctcaaatcgcgactcactatttcaaaggatacttcgaagaaccaagtggtgctgaaggtcaccaacatggatcccgccgatactgcaacctattactgcgcgcggagcatgattaccaactggtacttcgatgtttggggcgccggtaccacggtcactgtctcctcagcatccactaaaggaccttccgtttttccacttgcacctagctcgaagtcgaccagcggaggcaccgcagctcttggatgtcttgtgaaggattactttcctgagccagtcactgtgtcatggaacagcggcgcgctgacttcgggagtgcataccttccctgctgttcttcaatcgtccgggctgtactccctttcctcagtggtcactgtgccatcttcctcccttggtacccaaacgtacatctgtaatgtcaaccataaaccttcgaatactaaagtcgataagagagtcgaacctaaatcttgtgacaaaacgcacacttgcccaccttgtccagcaccggaacttctgggtggcccctcggtgtttcttttcccacctaagccgaaagacactcttatgatttcccgtactcctgaagtgacttgcgtggtggtggatgtgtcacacgaggatcccgaagtgaagttcaactggtatgtcgacggggtggaggtccacaatgctaagactaagcctcgcgaagaacagtacaactccacttatagagtggtgtctgtgcttaccgtgctccatcaggattggctgaacggaaaagagtacaagtgtaaagtgtccaacaaggcattgccggcgcctatcgagaaaactatcagcaaggcaaagggacagccaagggaaccccaggtctacactcttcccccctctcgcgaggagatgactaagaaccaagtctcgttgacctgtcttgtcaaaggtttctacccaagcgacattgcagttgaatgggagtcaaatggacaaccagagaataactacaagaccaccccgccagtgctggattccgacggatccttttttctctactccaagctcactgtggataagtcacggtggcaacagggaaacgtgttctcctgttcggttatgcacgaagctctgcataaccactacactcagaagtcactgagcctgtccccggggaag

SEQ ID NO: 15848 - DNA, 1422 bp, synthetic construct
  misc_feature 1..1422: note = source = /note="Description of Artificial Sequence: Synthetic coding sequence"
  source 1..1422: mol_type = other DNA
atggcggtgatggccccgcggaccttggtgctcctgctgtccggcgctctggcgctgactcaaacctgggcccaagtcacgctccgggaatcgggtccggcacttgtgaaacctactcaaaccctgactctcacgtgcaccttctcagggttctcactttccacctcaggaatgagcgtgggttggatccgccagccgccagggaaggccttggagtggctcgcagatatttggtgggatgataagaaagactacaatccgtccctgaaatcgcgcctgaccatcagcaaggatacgagcaaaaatcaggtggtcctgaaggtgactaacatggacccggcggacacggcgacttactactgcgcacggtcaatgatcaccaactggtactttgacgtgtggggagctggaaccactgtgaccgtgagctcggcctccactaagggcccttcggtgtttccacttgccccatcgtccaagagtacttcgggtgggacggccgcgctgggatgtcttgtgaaagactacttccctgaacctgtgacggtttcatggaattccggagctctcactagtggagtccataccttcccggcagtgctccagtcgtcagggttgtactccctgtcctcggtcgttaccgtgccatcctcatcgcttggaacgcaaacctatatctgcaatgtgaaccataaaccttccaacaccaaagtcgacaaaagagtggagccaaagtcctgcgataagacccacacttgcccgccttgtcccgctcccgaactgttgggcggcccctcagtattcctgttccccccgaagcccaaggacactcttatgatctcccgaactccggaggtgacctgcgtcgtcgtggatgtctcacacgaagatcctgaggtaaagttcaactggtacgtggatggtgttgaggtccacaacgccaagacgaagccgcgcgaagaacagtacaacagcacgtaccgggtcgtgtccgtgctcactgttttgcatcaagactggctgaacggcaaggagtacaagtgcaaagtgtcgaacaaagcactcccagcgcccatcgaaaagactatttcaaaggccaaaggacagccccgcgagccgcaagtgtacaccctcccaccgagccgtgaagaaatgaccaagaatcaggttagtctgacctgtcttgtaaagggattttacccttccgacatcgcagtggagtgggaatctaacggacagcctgaaaacaactacaagaccaccccacccgtcctggactcggacggcagctttttcctctatagcaagctgaccgtcgacaaatccaggtggcagcagggaaatgttttctcttgcagcgtcatgcacgaggccctccacaatcactacactcagaagtcattgtccctgtctccgggaaag

SEQ ID NO: 15849 - DNA, 1422 bp, synthetic construct
  misc_feature 1..1422: note = source = /note="Description of Artificial Sequence: Synthetic coding sequence"
  source 1..1422: mol_type = other DNA
atggcggtgatggcaccccgaacccttgtcctgctgctgtctggtgcccttgcccttacccagacctgggcacaagtcactttgagagaatccggccctgcccttgtcaagcctacgcaaaccttgaccctcacctgcactttttcgggattttctttgtccacctcgggaatgagcgtgggttggattaggcaaccacccggtaaggcgctggaatggctggctgacatatggtgggatgacaagaaggactataacccgtcgcttaaatcgcgccttaccatttcaaaagatacctccaaaaaccaagtcgtgttgaaggtgactaacatggatcctgctgacaccgcaacctactactgtgctagatcgatgatcactaactggtacttcgatgtgtggggggccggtaccaccgtcacggtgtcctccgccagcaccaagggaccctcagtctttccattggcgccgtcctcaaagtcgacgagcggtggaactgcagcacttggctgcctcgtgaaagattactttccagagcccgtgaccgtgtcctggaactcaggggcacttacttcgggagtccatacctttcctgccgtgctccaatcatcgggactgtacagccttagctctgtggtgactgtcccatctagctccctgggcacgcagacttacatttgtaacgtgaaccataaaccttcgaacactaaggtggacaaacgggtggaaccaaaaagctgtgataagactcatacttgccctccttgtcccgcacctgagctcttggggggaccatccgtgtttttgtttccacctaagccgaaagacactctgatgatatcgagaacccctgaggtgacgtgtgtggtggtggatgtgagccacgaagatccggaggtcaagtttaactggtatgtcgatggcgtggaagtgcataatgccaaaactaagcctagagaagaacaatacaactcgacgtacagggtggtgtcagtgctcacggtgctgcaccaggactggcttaacggcaaggaatacaaatgcaaggtgtcgaataaggcactgcctgcccccattgaaaagaccatcagcaaggcaaagggacaacccagagaaccacaggtctacactttgccgccctcgcgggaagagatgaccaagaaccaggtttccctgacttgtctggtgaaggggttctacccgtcggatattgccgtggaatgggaatccaatggacagccagagaataactacaagaccactccacctgttcttgattccgatggttccttcttcctctacagcaagctgaccgtcgacaagtccaggtggcagcaaggtaacgtgttcagctgtagcgtgatgcatgaagccctccacaatcattacacccagaaatcccttagccttagccctggtaag

SEQ ID NO: 15850 - DNA, 1422 bp, synthetic construct
  misc_feature 1..1422: note = source = /note="Description of Artificial Sequence: Synthetic coding sequence"
  source 1..1422: mol_type = other DNA
atggcagtgatggcacctagaactcttgtgttgctcctgtccggagcacttgccctcacccagacctgggcccaagtcacgctccgagaatcgggaccagcactcgtgaaacctactcagaccctgaccttgacctgtacgtttagcggatttagcctgagcaccagcggaatgtcggtcgggtggattagacaacctccaggcaaggctctggagtggctggcagatatttggtgggatgacaagaaggattacaatccttctcttaaatccagattgactataagcaaagatacttctaagaaccaagtggtcctgaaagtgaccaatatggatccagcggataccgcaacttactactgcgctaggagcatgattactaactggtactttgatgtttggggagcaggcactactgtgaccgtgtccagcgcatcgaccaaggggccttcggtctttcctctggcaccttcgagcaaatccactagcggtggaaccgcagcgcttggttgtctcgtgaaagattacttcccagagcctgtgacggtttcctggaattccggtgcacttacttcgggagtgcatacctttcctgccgtccttcaatcgtcaggactctactccctgtcctcggtggtgactgtgccatcgtcctccctgggaactcaaacttacatctgcaatgtcaaccacaagcctagtaacactaaggtcgacaagcgggtcgaacctaagtcgtgcgataaaactcatacctgtcccccgtgtcctgcacccgaacttctgggcggcccttccgtgtttctctttccaccgaagcctaaggatacgcttatgatatcgagaaccccagaagtcacttgcgttgtggttgacgtctcccacgaggaccctgaggttaagttcaattggtacgtggatggggtggaagtgcataacgcgaaaaccaagccacgtgaggaacaatacaacagcacttaccgagtggtgtcagtgttgactgtgctccatcaagactggcttaacgggaaggaatacaagtgtaaggtatcaaacaaggcacttcctgctcctatcgaaaagactattagcaaggcaaagggtcagccacgggaaccgcaggtgtacacccttccaccatcacgtgaagaaatgaccaagaatcaggtgtccctgacctgtctcgtgaagggcttctacccgtcagatatcgccgtggaatgggagagcaacggccagccagagaataactacaaaaccactcccccagtgcttgactcggatgggtcattctttctgtactcaaagctgactgtggacaagtccagatggcaacaaggaaatgtgttctcctgttcggtgatgcacgaggcgctgcataaccactacacccagaagagcttgtccctgtcgccaggaaaa

SEQ ID NO: 15851 - DNA, 1422 bp, synthetic construct
  misc_feature 1..1422: note = source = /note="Description of Artificial Sequence: Synthetic coding sequence"
  source 1..1422: mol_type = other DNA
atggctgtgatggcgcctagaaccctagtgctactgctgtccggcgccctggccttgacacaaacttgggcgcaggtgaccctgcgcgagtccggacctgcccttgtcaagcccacacagacactgacgctgacctgtaccttttctggctttagtctttctacctccgggatgtctgtcggctggattcgccagccaccaggcaaagctcttgagtggctcgccgatatctggtgggacgacaagaaagattataacccttccctgaaatcacggttgacgatatccaaggacacttcaaaaaatcaggtcgttttgaaggtgaccaacatggatcctgccgacacggccacgtattattgtgcgaggagtatgattaccaactggtacttcgacgtttggggggccggaacaactgtgaccgtctcatccgcgagcactaagggaccctctgtgttcccattagccccctcaagtaagtccacatcaggaggtacagcggctttgggctgcctggtgaaggattacttccctgaacctgttaccgtgtcatggaattccggcgcattaacaagcggcgtacatactttccctgctgtgcttcaaagtagcgggttgtactccctgtcaagtgtcgtgacagtgccctccagctcgttgggaactcagacctatatttgcaatgtgaaccacaagccctccaataccaaggttgataagcgcgtggaaccaaagtcttgtgacaaaacccacacctgcccgccctgtccagctcctgagttgttgggcgggccttccgtcttcctgttccctccaaaacccaaggatactctgatgatcagtcgcacccccgaagttacgtgcgtcgttgtggatgtgtcacatgaggatccagaggttaaattcaattggtacgtggacggcgtggaagtgcataacgccaagactaagcctcgggaggaacagtataattccacataccgcgtcgtatccgtcttaaccgtactgcaccaggattggcttaacggcaaggagtacaaatgcaaggttagtaacaaggccctgcccgccccaatcgagaaaacaatatccaaagccaaaggccaaccgagagaaccacaggtctacaccttgcctccatcgcgtgaagagatgactaaaaatcaagtcagcctgacttgcctggtcaaggggttctatccaagtgacattgcagtcgagtgggagtcaaatgggcagcccgagaataactataagacaaccccccccgtacttgatagcgatggctctttctttctctactcaaagctgaccgtggacaagagccggtggcagcagggcaacgtgttcagctgctcagtaatgcacgaggctctccacaatcattacacccagaagagcctaagcctgtcacctgggaag

SEQ ID NO: 15852 - DNA, 1422 bp, synthetic construct
  misc_feature 1..1422: note = source = /note="Description of Artificial Sequence: Synthetic coding sequence"
  source 1..1422: mol_type = other DNA
atggcagtgatggctccgcggaccctggtcctcctgttgtcaggagccctggcgctgactcagacctgggcgcaagtgaccctgcgggaaagcggaccggcgctggtcaagccaactcaaaccctgactctcacttgcactttcagcggattttcactgtcgacctcgggtatgtcggtgggatggatccggcagccgcccgggaaggccctggagtggctggcggacatctggtgggatgacaagaaggattacaatccgtccctcaaatcgcgccttacgatcagcaaggacacgtccaagaatcaagtggtgctgaaggttaccaacatggatccggccgataccgcgacctactactgtgcccgctcaatgatcactaattggtactttgacgtctggggcgcgggtactaccgtcactgtgagctccgcctcaactaagggcccgtcagttttcccgttggcaccgagctcaaaatccacctccggcggaaccgcggctttgggttgtcttgtgaaggactacttccctgaaccggtcaccgtgagctggaattcaggagctttgacctccggcgtgcatacgttccctgcggtgctgcagtccagcggactgtacagcctttcatcggtcgtcaccgtcccgtcatcctccctgggaacgcagacctacatttgcaacgtgaaccacaagccttccaatactaaagttgacaagcgcgtcgagccaaagtcctgcgacaagactcatacctgcccgccttgccctgctccggaactgctcgggggaccatcggtgttccttttcccaccaaagccaaaggacaccctgatgatctcacgcaccccagaagttacgtgcgtcgtggtggatgtctcgcatgaggatccggaagtcaaattcaattggtacgtggacggcgttgaagtgcacaacgcgaaaaccaagccccgcgaagagcaatacaattcgacttaccgagtcgtgagcgtgctcaccgtcctgcaccaagattggctcaacggaaaagaatacaaatgcaaggtttcgaacaaggccctgccggcgcctatcgaaaagaccatctccaaggcgaagggccaacctcgggaaccgcaagtctacaccctcccgccctcccgcgaggaaatgaccaagaatcaggtgtcgctgacctgcttggtgaagggattctacccgtcggacatcgccgtagaatgggagtcgaacggccagccggaaaacaactacaagactacgccccctgtccttgactcagacggatccttcttcctgtactcaaagctcactgtggataaatctcggtggcaacaaggaaacgtgttctcctgttccgtgatgcatgaagctctgcataatcactacacccagaaatcgctcagcctgtcgccgggaaaa

SEQ ID NO: 15853 - DNA, 1422 bp, synthetic construct
  misc_feature 1..1422: note = source = /note="Description of Artificial Sequence: Synthetic coding sequence"
  source 1..1422: mol_type = other DNA
atggctgttatggctcctaggactctcgttcttctcctctcaggggcattggccttaactcaaacgtgggcacaggtgactcttcgagagtcaggtccagcacttgtgaaacctacacagactctcacccttacttgcaccttttccggtttctcactgtcaacttcaggcatgtcggttgggtggatacgacagccgccaggcaaggctcttgagtggctcgcagatatctggtgggacgataagaaggattacaatccttcactaaaatcaagactaactatttccaaggatacatcaaaaaaccaagtggttctcaaggtcaccaacatggatccggcagatactgcaacctactactgcgccagatccatgatcacaaattggtatttcgacgtttggggtgccggtactacagtaactgtttcttctgcaagcactaagggcccttcagttttcccgctcgctccttcaagtaagagcacttctggtggaactgctgctcttggttgtcttgttaaggactactttcctgaaccagtgactgtgtcttggaactctggtgcattaacctctggtgtccacacttttccagctgttttgcaatctagcggactctattcacttagtagcgtagtgaccgttccatcgtcctcacttggtactcaaacctacatttgcaacgttaaccacaaaccatccaatacgaaggttgataaacgggtggagccgaagagttgcgataaaactcatacctgtcctccgtgcccggcacctgagctcttgggcgggccaagcgtgttcttgtttccaccaaaacccaaagataccctcatgatatccaggaccccggaagtgacttgtgttgtggttgatgtaagtcacgaagatccggaagttaaatttaattggtatgtggatggtgttgaggttcataatgcaaagacgaaacctagagaggagcagtataattctacctaccgggttgtttcggtattgacagtcctgcatcaagactggctcaatggaaaagagtataaatgtaaggtgtccaacaaggcactgcccgctcctatcgaaaagactattagcaaagcaaaaggccagccgcgcgaaccacaagtttacactttgcctccttcgagggaagagatgacaaaaaaccaagtttcattgacttgtctggtgaaagggttctatccttcagatattgcagtcgaatgggaatctaacggacagcctgagaacaattacaaaactactcctcccgttctagactctgatggttcgttcttcttgtatagcaagcttactgtagataagtcgagatggcagcaaggaaatgttttcagctgctctgtgatgcacgaggcgttgcacaatcattatacgcagaagtcactttcgctttcccctggaaag

SEQ ID NO: 15854 - DNA, 1422 bp, synthetic construct
  misc_feature 1..1422: note = source = /note="Description of Artificial Sequence: Synthetic coding sequence"
  source 1..1422: mol_type = other DNA
atggcagtaatggcacctagaacactcgtgttgttgctttctggagcactggctttgacgcagacctgggcccaggtaaccctccgtgaaagcgggccggcactggtgaagcccacacagaccttaacactgacctgcacgttcagtgggttttctttatctacctctggcatgtctgtggggtggatcaggcaaccccctggcaaggccttggagtggctcgctgacatctggtgggatgacaaaaaagactacaatccatctctgaagagccgcctgaccatctcgaaagatacctcaaagaatcaggtggtcctcaaggttaccaacatggaccccgcagacactgccacatactactgcgctaggtccatgatcacaaactggtactttgacgtctggggtgcagggaccacggtgactgtcagctctgcatcgactaaaggcccctcggtgttcccccttgccccctctagcaaatcaaccagcgggggcaccgctgcacttggctgcttggttaaggattattttccagaaccagttacggtctcatggaattctggggccctcacgtcgggagtgcatacattccccgcggtcttgcaaagtagcggcctctatagcctcagtagtgtcgtgacggtccctagcagttcgctcgggacccagacgtacatctgcaatgtaaatcataagcctagcaataccaaggttgataaacgtgtggagccaaagagttgtgataagacccacacttgcccaccttgtcccgctcccgagctgctggggggccctagtgtttttctgtttccgcccaaacccaaggacaccctgatgatctcccgcacccccgaggtcacatgtgtggtagtcgatgtttcacatgaagatccagaggtcaagtttaattggtatgtggatggcgtggaagttcacaacgctaagaccaaaccaagagaagagcagtataattctacctacagagtcgtgagcgttcttactgttttgcatcaggattggctgaacggaaaggagtataagtgcaaagtttcgaacaaagcactcccagccccaatagagaaaacaatatcaaaagccaagggccagcccagggagccgcaggtatatactctgccccccagcagggaagagatgacaaagaatcaggtgagcctgacatgcctcgtgaagggattctacccctccgacattgctgtggagtgggagtccaacggtcagccagagaataattacaagactacacccccagtgctcgattccgacggaagctttttcctgtatagcaagctgaccgtggataagtctcgttggcaacagggtaacgtcttctcttgctctgtcatgcacgaggcgctacacaatcattatacgcaaaaatcgctctctctaagcccgggaaag

SEQ ID NO: 15855 - DNA, 1422 bp, synthetic construct
  misc_feature 1..1422: note = source = /note="Description of Artificial Sequence: Synthetic coding sequence"
  source 1..1422: mol_type = other DNA
atggctgtgatggctccaagaactctcgtgctcctattatctggagcactcgctctcacacaaacatgggcccaagtcactctgcgggaaagtggaccagcccttgtgaaaccaactcagacactcacactaacttgcacttttagtggattcagtctgagtacaagtggaatgtccgttggatggattaggcagccacctggaaaagctttagaatggctagcagacatctggtgggatgataagaaagattacaaccctagtcttaaatcacggctgactatcagtaaggatacttccaaaaaccaggtcgtgctcaaagtcacaaacatggatcccgctgatacagccacttattactgcgccagatcaatgataacaaattggtattttgatgtgtggggggcagggacgactgtaactgtgtcttctgcttctacaaaagggccttctgtatttcctttagcacctagttctaaatctacttctggggggacagccgcgctaggatgcctcgtgaaagattatttccctgaaccagtgactgtctcatggaacagtggagctctgacatcaggagtgcatacatttcctgccgttctccagtccagtggactctattctctgtcttctgtggtgactgtgccctctagttcattagggactcagacttatatttgcaacgtaaatcacaaacccagtaatacaaaagtggacaaacgggtggaaccaaaaagttgcgataaaacacatacatgtcccccatgccctgcccctgaactacttgggggacctagtgttttcctctttccccccaaacctaaagatacactaatgatttcccgaactcctgaagttacatgcgttgtagtggatgttagtcacgaggatcctgaagtcaagttcaactggtacgtagacggagtagaggtacataacgccaaaacaaaaccacgagaggagcagtacaattcaacatacagggtcgtgtcagtcttaacagtgcttcatcaggattggttaaacgggaaagaatacaaatgcaaagtgtctaataaggccctccctgcccctatagagaagacaatatctaaagccaaggggcagcccagggaacctcaggtgtacactctgccacccagtcgcgaagaaatgacaaaaaaccaggtgagtctaacttgcctggttaaaggattctatccttctgatatcgcggtagagtgggaatccaatgggcagccggaaaacaactacaagactacacctcctgtgctggattccgatgggtcgttctttttgtattccaaactcacagtggataagtcacggtggcagcagggaaacgtgttctcctgttccgtgatgcatgaagctctccataaccactatacacagaaaagtctttccctatcacctgggaaa

SEQ ID NO: 15856 - DNA, 1422 bp, synthetic construct
  misc_feature 1..1422: note = source = /note="Description of Artificial Sequence: Synthetic coding sequence"
  source 1..1422: mol_type = other DNA
atggccgtgatggcccctcgcacgctggtgttgctcctctcaggagctctggctctcacccaaacctgggcgcaagtgactttgagagaatccggacctgcgctcgtcaagccgactcagactctcactcttacctgcaccttctccggcttctcgctgtccacttccggcatgtcagtgggctggattcggcaaccaccgggaaaggccctcgaatggctggcagatatttggtgggacgacaaaaaggattacaacccgagccttaagagccgcctgactatctccaaggacacctcaaagaaccaagtcgttctcaaggtgaccaacatggatccggctgatacggcgacctactactgcgcccgcagcatgatcactaactggtactttgacgtctggggagccggcactaccgtgaccgtctcatccgcctccacgaagggaccgtccgtctttcctctggcgccatccagcaaatcgacctccggaggcaccgccgcgcttggatgtctcgttaaagactacttcccagaaccggtcaccgtgtcgtggaattcaggagccctgacttcgggggtgcatacgttcccagctgtgctgcagtcaagcggactgtacagcctgtcgtccgtggtgaccgtcccttcgtcctcactgggcactcaaacctacatctgcaacgtcaaccacaagccgtcgaataccaaggtggacaaaagagtggagccaaaatcatgcgacaagacccacacctgcccgccttgccctgcaccggaactcctgggtggtccttccgtgtttctcttcccccctaagccgaaggatactttgatgatttcgcggaccccggaggtgacctgtgtggtggtggatgtcagccatgaggaccccgaagtgaaattcaactggtacgtcgatggagtggaggtgcataatgcaaagaccaaacctcgggaagaacagtacaatagcacctacagagtagtctccgtgctgactgtcctccaccaggattggctcaacggaaaggaatacaaatgcaaggtgtcgaataaagccctccccgccccaatcgaaaagaccatctcaaaagcgaagggccagccccgcgaaccgcaggtttacactctgccgccatcacgggaggaaatgaccaaaaaccaggtatccctgacctgcctggtcaaaggattctaccccagcgatatcgcagtggagtgggagtcgaacggacagcctgagaataactacaaaaccacgcccccagtgctcgacagcgatggctcattctttctgtacagcaagttgaccgtggacaagagccggtggcagcagggcaacgtgttttcctgttcggtgatgcacgaggcactgcacaatcattacacgcagaaatcactttcgctgtcccccgggaaa

SEQ ID NO: 15857 - DNA, 1422 bp, synthetic construct
  misc_feature 1..1422: note = source = /note="Description of Artificial Sequence: Synthetic coding sequence"
  source 1..1422: mol_type = other DNA
atggcagtcatggcgccacgcaccctcgtgctgctcctgtcgggagcgctggccctgacccagacgtgggcccaggtcaccctgcgcgaatctggaccggcactcgtcaagcccactcagaccctcactctgacctgcacgttcagcggtttctcactgtccacttccggtatgtcggtgggatggatcagacaacctccgggcaaggccctcgagtggcttgccgatatctggtgggacgataagaaggattacaatccatcgctcaagtcaagacttactatttcgaaggacacttcgaaaaaccaagtggtgttgaaggtgactaatatggacccagccgatactgcgacctattactgcgcccggtccatgatcaccaactggtactttgacgtctggggagcgggtaccactgtgactgtttcttcggccagtactaagggccctagcgtgttccctctggcgccgagcagcaagagtaccagcggaggaaccgccgcgctgggatgtttggtgaaagattacttcccagaacctgttaccgtgtcgtggaacagtggggccctgacttccggagtgcatacctttccagctgtgttgcaatcgtcaggcctgtactcactgtcctccgtagtgaccgtgccctcctcgagtcttggcacccagacttacatttgcaatgtcaaccacaaaccaagcaacaccaaagtggacaagagagtcgaacccaagtcgtgcgacaagacgcatacctgtccgccgtgccccgcaccagaactcctcggaggacccagcgtctttttgttcccgcctaaacctaaagacacgctcatgatctcccggactccagaagtcacctgtgtcgtggtcgacgtgtcacacgaggacccggaagtgaagttcaactggtacgtggacggggtcgaagtgcataacgcgaaaacgaaaccgcgcgaggaacagtacaacagtacctaccgtgtggtgtcggtcttgactgttctgcaccaagattggctcaatggaaaggagtacaagtgcaaggtgtcaaataaggccctcccggctcccatcgagaaaaccatctccaaagctaagggccaaccccgcgagccgcaggtctacactctgcctccttccagggaggaaatgaccaagaaccaggtgagcctgacttgcctggtgaagggcttctacccatcagacatcgcagtcgagtgggaatcaaatggtcagccggagaacaactacaagacgactccgccggttctcgactccgatggatcgtttttcctctatagcaagctgactgtggataaatcccggtggcagcaggggaatgtgttcagctgctcagtcatgcatgaagcgttgcacaaccactacactcaaaagagcctttcactttcgccggggaag

SEQ ID NO: 15858 - DNA, 1422 bp, synthetic construct
  misc_feature 1..1422: note = source = /note="Description of Artificial Sequence: Synthetic coding sequence"
  source 1..1422: mol_type = other DNA
atggcagttatggcaccacgtaccctggtcctgcttctgagcggagctctcgctctgacccagacttgggctcaggtgactttgcgggagtcaggacctgcacttgtgaagccgacgcagacccttactcttacctgtacctttagcggcttttcactgtcgacctcaggaatgtccgtgggatggattagacaacctccagggaaagcactcgagtggttggccgatatctggtgggatgacaaaaaggattacaacccttcactgaagtccagacttaccatcagcaaagatacttccaaaaaccaagtggtgcttaaggtgaccaacatggatcctgccgacaccgccacctactactgcgccagaagcatgattaccaactggtacttcgatgtgtggggtgcaggaactacggtcaccgtgtcgtccgcctcgaccaagggcccttccgtgtttccactggcaccaagcagcaagtcgacttccggcggaacggcagcactgggttgtctggtgaaggactactttcccgaaccggtgaccgtgtcgtggaattcgggtgcgctgacctcgggtgtgcataccttccccgcagtgctgcagtcgtccggcttgtacagcctctcgtcggtggtgactgtcccctcctccagcctggggactcagacttacatctgtaatgtgaaccataaaccatccaacaccaaagttgataagcgggtggaaccaaagtcatgcgataaaacccatacctgtcctccctgccctgcccccgagcttctgggcggaccatcagtgttcctctttcctcccaagcctaaggacaccctgatgatttcgagaaccccagaagtgacctgcgttgtggtcgatgtctctcatgaggaccctgaagtcaagttcaattggtacgtggacggagtcgaggtgcacaacgccaagactaaaccgagagaagaacaatacaattccacctacagagtcgtgtcggtgcttacggtgctgcatcaagattggcttaacggaaaggaatacaagtgtaaggtgtccaacaaggctctccccgcccctattgaaaagactattagcaaggccaaaggccagccgagagaacctcaggtctacactctgcctccatcccgtgaggagatgaccaaaaaccaggtcagcctgacttgtcttgtgaaaggattctatccatcggatattgcagtcgagtgggaatccaatggccagcccgagaacaactacaagaccactcctccagtgcttgattccgatgggtcgttctttctgtactcgaaacttactgtcgataagtccagatggcagcaagggaatgtgttctcctgttccgtcatgcatgaagcactccacaatcattacactcaaaaaagccttagcctttcgcccggcaag

SEQ ID NO: 15859 - DNA, 1422 bp, synthetic construct
  misc_feature 1..1422: note = source = /note="Description of Artificial Sequence: Synthetic coding sequence"
  source 1..1422: mol_type = other DNA
atggccgtcatggcaccgcgcaccctggtgttgctgctgtccggagccctggccctcactcagacctgggcgcaagtcaccctgagggaatcaggaccggcgttggtcaaaccaactcaaacgctgacccttacctgtactttctccgggttttcattgtctactagcggaatgtcagtgggatggatccggcagccacctggcaaggctctcgagtggttggctgacatctggtgggacgataagaaggactataatccatcactgaagtcccgcctgaccatttccaaggacacttcgaaaaaccaggttgtgcttaaggtgaccaacatggaccctgcggacaccgccacttactactgcgcccggagcatgattactaattggtacttcgatgtctggggagctgggactaccgtcaccgtgtcctcggcctcgaccaagggaccgtcggtgttcccactggcccccagctcgaagtcgacctctggcggaaccgcagccctgggatgtctggtgaaggactactttcctgagcccgtgactgtgtcctggaattcaggtgcgctgacttctggagtgcacacgtttccagctgtgcttcagagcagcggactgtactcactgtcgtcagtggtgaccgtgccgagctcctccctcggaacgcaaacgtacatctgtaacgtgaaccataagcctagcaatactaaagtcgacaaacgcgtggagccgaagtcgtgcgataaaacccatacttgcccgccttgtccggcacctgagctgttgggaggaccatcggtgttcctgttcccacctaagccgaaggataccctgatgatctctcggacccccgaggtgacttgtgtcgtggtcgatgtgagccacgaggaccccgaagtgaagttcaattggtacgtggatggagtggaggtgcacaacgccaaaacgaagccaagagaagagcagtacaactcgacgtatcgcgtggtatccgtgctgaccgtgctccatcaagactggctgaatggaaaggagtacaaatgcaaagtgtcaaataaggccttgccggcaccgatcgagaaaacgatctccaaagccaaaggacaaccgcgggaaccgcaagtctacactctgccgccgtcccgcgaggaaatgaccaagaaccaagtttcactgacctgtctcgtcaaggggttctaccctagcgacatcgccgtcgagtgggaatccaatggacagcccgagaacaactacaaaactacgccgccagtgcttgactccgacggatcatttttcctctactctaagctcacggtggacaagtcacggtggcagcagggcaacgtgttctcgtgctccgtcatgcatgaggccctccataaccattatacccagaagagtctttcgctcagcccaggcaaa

SEQ ID NO: 15860 - DNA, 1422 bp, synthetic construct
  misc_feature 1..1422: note = source = /note="Description of Artificial Sequence: Synthetic coding sequence"
  source 1..1422: mol_type = other DNA
atggcagtaatggcaccacggaccttggtgctcttgctttcaggagctctggccctgacccagacttgggctcaagtgaccctgagggaatctggccctgcgcttgttaaaccaacccaaactctgaccctgacctgcacattctcaggatttagtctctccactagtggcatgtctgttgggtggatcagacagcctccgggaaaggctcttgagtggttggctgacatatggtgggatgacaagaaggattacaatccatccctgaaaagccgtttgaccatatctaaagatacctctaaaaaccaggtcgtgcttaaggtgacaaacatggaccctgcagatacagctacctactattgcgcaaggagtatgatcaccaactggtatttcgatgtctggggagctgggaccactgtaaccgtgagcagcgctagcaccaaaggtccaagcgtcttccccctggctccctctagtaagtctacaagtggcggtaccgcagcactcgggtgcttagtgaaggactattttcctgagcccgtaactgtcagctggaacagcggcgccctgacatccggcgtgcataccttccccgccgttctgcaatcatctgggctttactcgctaagcagtgtggtgaccgtacctagctcttcactcggcacccaaacctacatctgtaacgtgaatcataagccgtctaacactaaagtggacaagcgtgtggagccgaaatcgtgcgataagactcatacctgccctccatgtccagccccagaattgctcggaggccccagtgtgtttctttttccgcctaaacccaaggatactcttatgatatctaggacacccgaagtcacctgcgtagtggtggatgtcagccacgaggacccagaggttaaattcaactggtacgtggatggcgtcgaagtgcacaacgctaagaccaagcctagagaggagcaatataacagcacctacagagttgttagtgtccttaccgtgcttcaccaggattggctcaacggaaaagaatacaagtgtaaagtgagcaataaagctctcccggccccaattgaaaagactatctctaaggccaagggtcagcccagagaaccccaggtctacacactcccaccaagtcgcgaggagatgaccaagaaccaggtaagcctgacctgccttgtgaagggcttttaccccagcgatatcgcagttgaatgggagtctaatggacagccagagaataactacaagacgactccacctgtgcttgattcagacggatcctttttcctgtacagtaagctcaccgtggataaaagccgctggcaacaaggaaatgtgttctcgtgctcggtgatgcatgaggctcttcacaaccactacacacaaaaaagtctctccctctctcccggaaaa

SEQ ID NO: 15861 - DNA, 1422 bp, synthetic construct
  misc_feature 1..1422: note = source = /note="Description of Artificial Sequence: Synthetic coding sequence"
  source 1..1422: mol_type = other DNA
atggcagtaatggcgcctcgcacattagtcttactattgagcggtgctctggcactgacacaaacgtgggcccaagtaacgctgagagagagtgggcctgctttggttaagccgacacaaacactgacacttacgtgtacattttcagggtttagtctttctacaagcggcatgtcagtcggatggatacgccagcccccaggaaaagcactggaatggcttgccgatatatggtgggatgacaagaaagattacaacccgtcattgaagtctcgtttaacgatttcgaaggatacttctaagaatcaggtggtgttgaaagtgacgaatatggatccagctgatacggcaacatattactgtgcgaggtccatgattacaaattggtatttcgacgtctggggcgcaggcactacagtaacagtatcctctgccagtacaaagggaccgtcagtgtttccgctggcgccgtcctccaaatccacaagcggaggcacggctgcattgggctgtctagtcaaagattatttcccggaaccagtgacagtaagctggaactcgggtgcactgactagcggagtccatacatttccagccgtgttgcagagctctgggctgtatagtctttcgtcggtcgtcacggtaccgagttcctcgttagggactcagacttatatctgcaatgtcaatcacaagccgtcaaatactaaagtcgataagcgcgtagaaccaaaatcgtgcgacaaaacacatacgtgccctccgtgcccggcaccagagttgttaggtggaccgtcagtcttcctgttcccgcctaaacctaaagacactttgatgatcagccggacgccggaggttacatgcgtggtggtagatgtgtcacacgaggaccctgaagtcaaattcaattggtatgtggatggcgttgaagtgcataacgccaaaacaaaaccgagagaagaacagtataatagcacttatagggtggtgagtgtacttaccgtccttcaccaagattggttaaacggaaaggaatacaagtgcaaagttagtaacaaagcgttaccggcacctatagaaaagaccatttctaaagctaaagggcagccgcgcgaacctcaggtgtacacactcccgccatcgcgagaggaaatgaccaagaatcaggtttctttgacttgcttggtaaaaggcttttacccaagtgacattgcggtagaatgggaatctaatgggcagccagaaaataactacaagactacccctccggtacttgattctgacggttccttctttctttatagtaaacttaccgttgataaatcacgttggcagcaaggcaacgtgttttcttgctctgtgatgcacgaggccctgcataaccactacacacagaagtctctttctctatcaccgggaaaa

SEQ ID NO: 15862 - DNA, 1422 bp, synthetic construct
  misc_feature 1..1422: note = source = /note="Description of Artificial Sequence: Synthetic coding sequence"
  source 1..1422: mol_type = other DNA
atggccgtcatggcgcccaggaccctagtactattgcttagcggcgctctggcactgacgcagacgtgggctcaagttaccctccgggagtccgggccagctctagttaagcccacccagacgctaaccctcacatgtactttctccggttttagcctctccacatctggtatgagtgtggggtggatccggcaacctcccggcaaggcccttgagtggttagccgatatatggtgggacgacaaaaaggactacaaccctagcctgaaatccagactcactattagtaaggataccagcaaaaaccaggtggtgctcaaagtcactaacatggaccctgccgacactgccacatattactgtgccagaagcatgattaccaattggtacttcgatgtgtggggtgcaggcaccactgttacagtcagctccgccagtactaaggggcctagcgtctttcctttagctcccagcagtaagtctaccagtggcgggaccgccgccttaggctgtcttgtgaaggactactttccggagcccgtaactgtcagctggaacagtggcgccctgacaagtggggtgcacacatttccagcagtcctgcagtcaagcgggctgtatagtctgtcttcagtggtcaccgtaccttcatccagcctaggtacacagacctatatctgtaacgtgaatcataagccatcgaacacgaaggtggacaaaagggttgaaccaaaaagttgcgacaagactcatacctgccccccttgtcctgcccccgaactgctagggggaccaagcgtgttcctcttccctccaaagcccaaggacacgctcatgatttcacggaccccagaggtgacttgtgtagtggtggatgtgtctcacgaagacccagaggtcaagttcaactggtatgtggacggagtggaagtgcataatgccaaaacaaagccgagggaggaacaatataattccacataccgcgtcgtgagcgtgcttacagtgttgcaccaggattggctcaacggtaaagagtacaaatgcaaggtttctaataaggcccttcctgcccctatagagaagacgatatctaaagcgaagggtcagccacgagaacctcaggtgtataccttgccacccagccgggaagaaatgacgaaaaaccaggtctcattgacatgcctcgtcaagggcttctatcccagcgacatagctgtggagtgggagtcgaatgggcagccagaaaacaactacaaaactactcctccagtgctggattctgacggatctttcttcttgtactctaagttgactgttgacaaaagtcggtggcagcaagggaacgtgttttcgtgctcagtgatgcatgaggcactccataaccactacacccagaaaagtctgtccttatcacccgggaaa

SEQ ID NO: 15863 - DNA, 1422 bp, synthetic construct
  misc_feature 1..1422: note = source = /note="Description of Artificial Sequence: Synthetic coding sequence"
  source 1..1422: mol_type = other DNA
atggcggtcatggctcctaggaccctggttctcctgctctccggcgccttggcgctcacccagacgtgggcccaggttaccctacgtgagtctgggcctgctcttgtgaaacccacgcagacccttactttgacgtgtaccttctctggcttctctctctcgacttccggaatgtctgtcggatggatccggcagcctccgggtaaggccctcgaatggttggccgacatctggtgggatgacaagaaggattataacccctccctgaaatcgcgtctgactatatctaaggacactagcaagaaccaagtcgtcttgaaggtcactaatatggaccccgctgataccgctacgtactactgcgcccgttcaatgattacgaactggtactttgacgtgtggggcgctggcaccacggtgacggtctcatccgcctctaccaagggcccttccgtgtttcctctcgctcccagctccaagtctactagtggggggaccgccgcattgggctgcctggttaaggattactttcccgagcctgtgacagtcagctggaactctggggcgcttacctctggggttcataccttcccggcggtgctccaatcgtccgggctgtacagcctttcttctgtcgttaccgtcccctcctcctccctgggtacgcagacctacatttgcaacgttaaccacaaaccgagcaacactaaggtggacaagcgcgtcgaaccaaaatcttgcgacaagactcatacttgcccgccctgccctgcgcctgagctgttgggtggcccatccgtgttcctgttccctcccaaacccaaagatactcttatgatcagccgcaccccggaggtaacgtgcgtggtggttgacgtctcccacgaggaccccgaggtgaagttcaactggtacgttgatggcgtcgaggtccacaacgccaagactaagccccgagaagaacagtacaattcaacttatcgtgtcgtgagcgtcttgactgtgctgcaccaggactggctaaacggtaaggagtataagtgcaaggtcagtaacaaggcgctccccgctcctatcgagaagacaatttcgaaggcgaaaggtcagccccgcgaaccacaggtctataccctccccccgtcccgcgaggagatgaccaagaaccaggtgtccctgacgtgcctcgtcaagggcttctacccctcggacatcgcagtcgaatgggagtccaacggacagcccgagaacaactacaagaccacgcccccagtgctggactcggacggctctttctttctgtacagcaaactcaccgtggataagtcccgctggcagcagggcaacgtgttcagctgcagcgttatgcatgaggcccttcacaatcactacactcagaagtccctgagcttatcgcccggtaag

SEQ ID NO: 15864 - DNA, 1422 bp, synthetic construct
  misc_feature 1..1422: note = source = /note="Description of Artificial Sequence: Synthetic coding sequence"
  source 1..1422: mol_type = other DNA
atggccgtgatggctcctaggaccctcgtgctgctcctctccggggccttggccctgacccaaacttgggctcaggtgactctcagagaatcaggacccgcacttgtgaaaccaacccaaacccttaccctgacttgcacgttctcaggattctccctttccacttcaggtatgtcagtgggatggattaggcaaccgccgggcaaagcgctcgaatggctcgcagacatctggtgggatgacaaaaaagactacaatccgtcgctgaagtccagactgaccatctccaaagacacgtccaagaaccaggtagtcctcaaggtgaccaacatggaccctgccgacaccgcaacttattactgcgcccgctcgatgatcaccaattggtacttcgacgtgtggggcgcgggaaccaccgtgaccgtgtcgtcggcttcgaccaagggaccaagcgttttcccgctcgctccgagctccaagtcaactagcgggggaaccgcagccctgggctgtttggtgaaggactacttcccggagccagtcaccgtgtcctggaatagcggcgcgctgacgagcggggtgcatacttttcccgctgttctgcagtcgtcaggcctgtactcgctcagctccgtggtgactgtcccctcctcatcgctcgggacgcaaacgtacatctgcaatgtcaaccataaaccatcgaataccaaggtcgacaagcgcgtggaaccgaagtcgtgcgacaagacccatacttgtccaccttgcccagcaccggagctgcttggaggaccatcggtgtttcttttcccgcctaagccgaaggatactctcatgatctcgcggactccagaagtgacctgcgtggtggtagacgtgtcgcatgaggaccccgaggtgaagtttaactggtacgtggacggtgtggaggtccataacgcaaagactaagcctagggaggaacagtacaatagcacttatcgggtggtgtctgtgctgactgtgctgcaccaggactggcttaacggtaaggagtacaaatgcaaagtgtccaacaaagcactgccggcgccgatcgaaaagactatctccaaggctaaagggcagccgcgggagcctcaagtctacaccctcccgcccagccgggaggagatgaccaagaaccaagtgtccctcacctgccttgtcaaaggattctacccgtctgacatcgccgtggagtgggagtctaatggacagcctgaaaacaattacaagactacgccgccggtgctggatagcgacgggagcttcttcctgtactcaaagttgactgtcgacaagtcacgctggcaacaaggaaacgtgttctcctgttcggttatgcacgaggcgctgcacaatcactacacgcagaaatcgctgagcctgtcacccgggaag

SEQ ID NO: 15865 - DNA, 1422 bp, synthetic construct
  misc_feature 1..1422: note = source = /note="Description of Artificial Sequence: Synthetic coding sequence"
  source 1..1422: mol_type = other DNA
atggcagtcatggccccaagaacactggtcttgctcctatctggagcactggccctaacacagacttgggcacaggtgactctacgagagagtgggccagctctggtgaagccaacccaaacccttacccttacttgtacattctccggcttcagtctcagcaccagtggtatgtccgtgggttggatacgccaaccaccgggtaaagccttggagtggctagccgacatctggtgggacgacaaaaaagactacaaccccagcctgaagtctaggctcacaattagcaaggacaccagcaaaaatcaggtggttctcaaggtgacaaacatggacccagcagatacagctacctattattgtgcgagatcaatgattacaaactggtacttcgatgtgtggggcgctggaaccactgtgacagtgtccagtgccagcacaaaaggcccaagcgtgtttcccctggcgccctctagtaaatccactagcgggggcaccgcggcactggggtgcctggtgaaggactactttccagaacccgttactgtgtcctggaactcaggagctctaacatccggggtgcatacctttcccgcggtcctacagtcatcggggttatactccctgtcatctgtggttactgttccatccagctctctggggacgcagacttatatatgcaatgtgaaccataaacctagcaacacgaaggtggataagagggtcgagccaaagtcgtgtgacaaaactcacacctgtcctccctgccccgctccagagctactgggagggccaagcgtgtttctttttccacctaaacccaaagataccttaatgatctctcggacccctgaagtcacctgcgtcgtcgtggatgtgtcccatgaagaccctgaagtgaaattcaactggtacgtggacggggtggaggtccacaatgctaaaaccaaacccagagaagaacagtataactcaacatatcgagtagtgtccgtcctgactgtcctccatcaggattggctcaatggtaaggaatacaagtgcaaagtctctaacaaagcactgccagcccccattgagaaaacaattagtaaggccaagggccagcctcgcgagccccaagtgtatacgctaccgccaagccgcgaagaaatgacaaagaaccaggtgagcttgacttgtctcgtgaagggattctatccctcagatattgccgtggagtgggaatccaacgggcagccggaaaataactataaaacgacgcctcccgtgctagacagtgatggcagcttctttctctattccaagctcaccgtggataagtcccggtggcaacagggtaacgtgttcagttgttcagtgatgcacgaagccctgcacaatcactacacacagaagtccttgtccctttcccccgggaag

SEQ ID NO: 15866 - DNA, 1422 bp, synthetic construct
  misc_feature 1..1422: note = source = /note="Description of Artificial Sequence: Synthetic coding sequence"
  source 1..1422: mol_type = other DNA
atggcggtgatggcaccgcgcacccttgtgctccttctgagcggtgcactggcactgacccagacctgggcacaggtgactcttagagagtcgggccctgcgctggtcaagccgacccagaccctgacccttacttgtacgttttcgggatttagcctgtccacttccggaatgtccgtggggtggattcgccaaccccctggtaaggcgttggagtggctggccgatatttggtgggatgataagaaggactacaatcctagccttaagtcgagactgacgattagtaaggacactagtaagaatcaggttgtcttgaaggttaccaatatggatccagccgacaccgcaacttactactgtgcaagatctatgattaccaactggtacttcgacgtctggggagcagggacgactgttaccgtgagcagcgctagtactaaaggaccaagcgtgtttcccttggcaccatcttcaaagtcaactagcggtggaacggcagcactgggctgtctggtgaaggattacttccccgagcctgtgactgtgagctggaactccggagcacttacgtctggtgtgcacactttccctgcggttcttcaatcgagcggcctttatagcctgtcgtcagtggtgaccgtgccaagcagctccctcggaactcagacctacatctgcaacgtgaaccacaagccgtcaaataccaaggtggataagcgagtggagccaaagagctgtgacaagacccatacttgccccccatgtccggcacctgagctgctgggtggaccttcggtgttcctctttccaccgaagcctaaggacacgcttatgattagccgaactccagaagtgacttgcgtggtagtggatgtctcgcatgaagatcccgaagtgaaattcaactggtacgtcgacggagtggaggtccacaacgccaaaaccaaacctcgagaagagcagtataactcaacctacagggtggtgtccgtgctgacggtgcttcaccaggattggctcaatggaaaagaatacaaatgtaaagtctccaacaaggccctccctgccccaattgagaaaactatatcgaaggccaagggtcaacctcgcgagcctcaggtgtacacccttccccctagccgtgaagagatgaccaaaaaccaagtcagcttgacctgccttgttaagggtttttacccctcggatatcgcagtggaatgggaatcgaacggccaacctgaaaacaattacaaaaccacccctcccgtgctggactcggatggttcgttttttctgtatagcaaactgacggtggataaatcgaggtggcaacaaggaaacgtgttttcgtgttcggtgatgcatgaagcactccataatcattacacccaaaagagcctgtcgctttcacctggtaag

SEQ ID NO: 15867 - DNA, 1422 bp, synthetic construct
  misc_feature 1..1422: note = source = /note="Description of Artificial Sequence: Synthetic coding sequence"
  source 1..1422: mol_type = other DNA
atggcggtcatggcaccgagaaccctggtgctgctccttagcggcgcacttgcactgacccagacctgggctcaagtcacgctgcgggagagcggcccggcgctggtcaagccgacccagactctgacactaacctgtaccttcagtggctttagtctcagcacctccggcatgtcagttggatggattaggcagccgccgggcaaagctctggaatggctggctgacatctggtgggacgacaagaaggattataacccctccctgaagtcacgtttgaccatctccaaggatacgagtaaaaaccaggttgtcttgaaagtgacaaacatggacccagctgacaccgccacttattactgcgcccgatccatgatcactaattggtatttcgatgtgtggggcgccggcaccacagtgacagtatcgagtgccagtactaagggtccctcagtgtttcccttggcgccgagcagcaagagcacgagcggaggaaccgccgccctgggatgcttggtgaaagactactttccagagccagtgaccgtttcctggaacagcggcgccttaacctccggagtgcacacattcccagccgtattgcaatcatcgggcttgtattcgctcagctctgtggtgacggtgccctcctcgtccctggggacccagacgtacatatgcaatgtgaatcacaagcccagtaacaccaaggtagataagcgtgtagaacctaagtcctgcgataagactcatacttgccccccgtgccctgcccccgaacttttaggaggcccctccgtgttcctcttcccgcccaagccaaaggataccctaatgatttcgaggacgccggaggttacctgcgttgtcgtggatgtatcacatgaggacccagaggttaagttcaactggtatgtcgatggagtggaagtgcacaatgccaagactaagccccgcgaggaacaatacaattcgacctatcgcgtagtatccgtgctaacggttctccatcaggattggttgaacggcaaggagtacaagtgcaaagtcagcaataaggccttgccggcccccatcgagaagacgatttccaaggcgaagggacaaccccgagagccacaggtatacaccctgcccccatccagagaagagatgaccaagaatcaggtatccctgacctgcttggtgaaaggcttttacccgtccgatatagcggtcgagtgggaatcaaatggtcagccggagaacaactataagacgactccgcccgttctggattccgatggctccttcttcctgtactccaagctgaccgtagacaagtcccggtggcaacagggtaacgtcttcagctgctccgtgatgcacgaagccttgcacaaccactacacccagaaatccctgtcgttgagtccgggaaag

SEQ ID NO: 15868 - DNA, 1422 bp, synthetic construct
  misc_feature 1..1422: note = source = /note="Description of Artificial Sequence: Synthetic coding sequence"
  source 1..1422: mol_type = other DNA
atggcagttatggcgccacggacactcgtgctgctgctcagcggcgccttggcactgacacagacttgggctcaggtcactctcagagaaagtggaccggccttggtgaagcctacccagacgctcacactgacctgcacttttagcgggtttagcctgtctacctctggcatgtccgtcggctggatcaggcagcctcccgggaaggcgctggaatggctggcagacatctggtgggatgataagaaagattataaccccagtctgaagagtcggctgaccatctcaaaggacaccagtaagaatcaggtggtgctgaaggtgactaacatggatccagccgacaccgcgacatattactgtgccagatcaatgataacaaattggtacttcgacgtgtggggggctggcaccaccgtgaccgtgagtagcgcgagcaccaaagggcctagtgtgtttcctctggctccatcatcaaaatctactagcggagggactgctgccctcggatgccttgtgaaggactactttccggagccagtcaccgtttcttggaacagcggtgcactgaccagcggtgtgcataccttccctgcggtattgcagtcaagcggtctttacagcctgagcagcgtggttaccgtacccagtagctcccttggcacccaaacctacatctgtaatgtgaaccacaagccgagtaacacaaaagtcgataaacgcgtcgagcctaaatcctgcgacaagacccatacctgcccaccatgtccggcacctgaactgctcggcggtcctagtgtctttctcttcccgcccaaaccaaaagatacattgatgatttctcgaacgcccgaagtgacatgtgtagtcgtggatgtgtcccacgaagatcctgaggtaaagttcaactggtatgttgacggggtggaggtgcacaatgcgaagaccaaaccccgggaggaacagtacaattccacgtaccgcgtcgtcagtgtcctgaccgttctgcatcaggactggctgaatggcaaggagtacaagtgcaaggtgtccaacaaggctctgcccgccccaatcgagaagactatcagtaaggccaagggtcaacccagagagccccaggtttacaccctgcctcccagccgagaggaaatgaccaaaaatcaggtgtctctgacttgcttggtcaaagggttttacccgtccgatattgcggttgagtgggaaagtaacggacagccggagaacaactacaaaacaacgccaccagttctggacagcgatgggagctttttcctgtattccaaactcacagtggataaatcccgatggcaacaggggaacgtgtttagttgtagtgtgatgcacgaggctctgcacaatcactacacccaaaaatctttgtctctttccccgggaaaa

SEQ ID NO: 15869 - DNA, 1422 bp, synthetic construct
  misc_feature 1..1422: note = source = /note="Description of Artificial Sequence: Synthetic coding sequence"
  source 1..1422: mol_type = other DNA
atggcagttatggccccgaggacacttgttctcctgctgtctggtgctttggctctgacccagacttgggctcaagttactctacgagagagcggaccagcactcgtgaaacctacccaaacactgacactgacctgcaccttttcaggatttagtctgagcacatccggtatgtccgtggggtggatccgacaacccccaggtaaggctctggagtggctcgccgacatttggtgggatgataagaaggactataatccttctttaaagagccgactgacaatctctaaggataccagtaaaaaccaggtggtcttaaaagtgaccaatatggacccggccgatacagcaacttattactgcgcccgaagtatgattacaaactggtattttgacgtctggggtgccggtacaactgtcacagtttcgtctgctagcacgaagggaccttccgttttcccgctggccccatcaagcaagagtacctctggtggaactgccgctctcggatgccttgtcaaagattatttccccgagcccgtgaccgtgtcctggaattccggagcccttacgagtggcgtgcacacatttcctgccgttctccagagcagtggtctgtactcgctgtcatccgtggtgacggttccctctagcagcctcggcacgcagacttacatctgtaatgtgaaccataagcccagtaacactaaggtggacaagcgcgtcgaaccgaaatcttgtgataaaactcatacatgtcctccctgtcccgcacccgagttgttgggcggccccagcgtgttcctgttcccacctaagccaaaggacaccctgatgatttccagaacccctgaggttacctgtgtcgtggttgacgttagccacgaggatccggaagtcaagtttaattggtacgtggacggagtagaggttcataacgcgaagactaaaccacgtgaagagcaatataattcgacttatcgagtcgtatctgtcctcaccgttctgcatcaggactggctgaatggcaaggagtacaaatgtaaagtgtctaacaaggccttacctgcaccaattgagaagactattagcaaagcgaaagggcagccacgtgagccccaggtgtatacgctccctccctctcgcgaggagatgactaaaaaccaagtaagcttgacttgtctggttaagggcttttatccaagcgacatcgccgtcgagtgggagagtaatgggcagccagaaaataattataaaactacacccccagtgctggattcggacgggtcattctttttgtactcaaagctcacagttgataaatctcgatggcaacaaggaaatgtcttcagttgcagtgtgatgcatgaggcgctgcataatcactacacccagaagtccctgagtctgtcgcccggcaaa

SEQ ID NO: 15870 - DNA, 1422 bp, synthetic construct
  misc_feature 1..1422: note = source = /note="Description of Artificial Sequence: Synthetic coding sequence"
  source 1..1422: mol_type = other DNA
atggctgtgatggccccaagaacactcgtactccttctatcaggggcattagcattaacacagacctgggcacaggtgacactcagagagagtggaccagccctagtgaagcccacacaaactctcactctgacctgtaccttctctggtttctccctcagcacaagcgggatgtctgtgggctggattcgtcagccacccgggaaagccctggaatggcttgcagacatatggtgggacgataagaaggactacaatccctccctcaagagccgcctgaccatctcgaaggatacgagtaagaaccaggttgtccttaaggttacaaatatggacccggctgatacggccacctactactgcgcacgaagcatgattaccaattggtacttcgacgtttggggggctggcactaccgtcacagtgagtagtgcgagcaccaagggccccagcgttttcccgctggctccgagttcaaagtctactagcggtggcactgctgcacttgggtgcttggttaaagactactttccagaacctgtgactgtgagttggaactccggggcactgactagcggcgtgcatacgttccccgcagtactccagtccagcggcctgtattctctttcctctgtcgtgactgtgccctccagcagtctgggaacacagacgtatatctgtaatgtcaatcacaagccctctaacaccaaggtcgacaagcgagttgaacctaagagttgcgacaaaacacatacctgcccgccatgtccggcacctgaattgctgggcggcccgtctgtctttctttttcctcccaagcctaaggacactctaatgatctcgcggactcctgaggtgacgtgtgtagtggtggatgtgtcccatgaagatcccgaggtaaagtttaactggtatgtggatggtgtggaagtccacaatgccaagacgaagcccagggaagaacaatataacagcacctaccgggtggtgtccgtgcttactgttttacatcaagattggctgaatgggaaggaatataaatgtaaggtctctaataaggcactcccggccccaattgagaaaaccattagcaaagctaaagggcagccccgggagcctcaggtctacaccctgccaccttctagggaggagatgactaaaaaccaggttagcctgacctgtctggtgaaaggattttatccgtctgatattgctgtcgagtgggaatccaacggacaacctgagaataattataagaccactccccccgtccttgattccgatggctcctttttcctatactcgaaactgaccgtagacaagtcccgttggcagcagggtaatgttttttcatgcagcgtaatgcacgaggctttgcataaccactacacacagaagtcactgtccctatctcctggaaag

SEQ ID NO: 15871 - DNA, 1422 bp, synthetic construct
  misc_feature 1..1422: note = source = /note="Description of Artificial Sequence: Synthetic coding sequence"
  source 1..1422: mol_type = other DNA
atggctgtgatggcgccacggaccctggtgctcctgctctcgggagccctggccctcacccagacgtgggctcaggtgaccctgcgcgaaagcgggccagcactggtgaagccaacgcagacgctgactctcacctgcaccttctccggattctccttgtcaacttcgggaatgtccgtgggctggatccgccaaccacctggcaaggcccttgaatggctggcggacatctggtgggacgacaagaaagactacaatccgagccttaagtcccgcctgaccatcagcaaggatacctcaaagaaccaggttgtgctgaaggtcaccaatatggacccggcggacaccgccacctactactgcgcacggtcaatgattactaattggtacttcgatgtgtggggagccggcactaccgtgaccgtgtcatccgcctcgactaagggcccttccgtgttcccgctggccccgtcatcgaagtccacttccggcgggactgcagcgctgggctgcctcgtgaaggattactttccagaacccgtgaccgtctcgtggaactccggcgccctgacttcaggcgtgcacactttcccggcagtgcttcagagcagcggactgtactcgctgtccagcgtggtgactgtgccctcatcatcgcttgggactcagacctacatctgcaacgtgaaccataaaccgtccaacaccaaggtggacaagagagtggaacctaaatcgtgcgacaaaacccacacctgtcctccgtgccctgcccccgaactgttgggcggaccgtccgtgtttctgttcccgccgaaaccaaaagacactctgatgatctccagaactccggaagtgacttgcgtcgtggtggacgtctcccacgaagatccagaagtgaagttcaactggtacgtggacggcgtggaagtgcacaatgccaagaccaaaccgagagaggagcagtacaattccacctaccgggtcgtgtcggtgctgaccgtgctccatcaagactggctcaatggaaaagagtacaagtgcaaggtgtccaataaagccctgccggctccgatcgagaaaaccatttcgaaagccaagggccaacccagggaaccgcaagtctacacgctcccgccgtcgagggaagaaatgactaagaaccaagtgtcgctgacttgtcttgtgaagggcttctacccgtcagacatcgcggtggagtgggaatcgaacggtcagcccgagaacaattacaagaccaccccgccagtgctggattcagacggtagcttcttcctctactcgaagctgactgtcgacaagagccgctggcagcagggtaacgtgttctcatgctcggtcatgcacgaagcactgcataaccattatacccagaagtcgctgagcctgtcgcccggcaag

SEQ ID NO: 15872 - DNA, 1422 bp, synthetic construct
  misc_feature 1..1422: note = source = /note="Description of Artificial Sequence: Synthetic coding sequence"
  source 1..1422: mol_type = other DNA
atggcggtgatggcaccgcgcaccctggtgctgttgctctcgggcgctcttgcgctgacccagacttgggcgcaagttaccctgagagaatcaggcccggccctggtgaagcccactcagaccctgaccttgacctgtaccttctccgggttcagcctcagcacttcaggcatgtccgtgggatggattcggcagcccccggggaaagcccttgagtggctggctgatatctggtgggatgacaagaaggactacaacccgagcctgaagtcccggctgactatttccaaggacacttcgaaaaatcaggtggtcctgaaggtaaccaacatggatccggccgacaccgctacttactattgcgccaggtcaatgattaccaactggtacttcgacgtgtggggcgcaggaacgaccgtgacggtgtcgtccgcgtccaccaagggaccgtcagtgttcccattggccccatcctccaaaagcacctccggcgggaccgcagcgttgggctgcttggtgaaagactactttccagagccggtgactgtctcgtggaactcgggagcgctcactagcggagttcacactttccctgcagtgctgcagtcgtcgggactctactcgttgtcctcggtggtgaccgtgccgtcatcaagcctgggaactcagacctatatctgcaacgtcaaccataagcctagcaacactaaggtggacaaacgggtggagccgaaatcatgtgacaagactcatacctgccctccgtgcccagcgcccgaactgctcggggggccgtccgtgtttctcttcccaccaaaaccaaaggatactctgatgatttccagaacgccagaggtcacctgcgtcgtggtggatgtgtcccatgaggacccggaagtgaagtttaactggtacgtcgacggagttgaagtgcacaatgccaagacgaagccacgggaggaacagtacaattcgacttacagggttgtctcagtgctgactgtcctgcatcaggactggctcaatggcaaggaatacaagtgcaaggtcagcaataaggccctgccagctccgatagaaaagaccatctcgaaggcgaaggggcagccacgagaaccacaagtttacactctgccgcctagcagagaggaaatgactaagaaccaggtcagccttacctgcctcgtgaaaggattttaccctagcgatatcgcggtcgagtgggagtcgaatggtcagccagaaaacaattacaagaccactcccccggtactggattcggacggctcattcttcctgtactccaaactcactgtggataagagcagatggcagcaaggaaatgtgttctcctgttcagtcatgcacgaagcactgcataatcactacactcagaaaagcctgtcactctctcccggaaag

SEQ ID NO: 15873 - DNA, 1422 bp, synthetic construct
  misc_feature 1..1422: note = source = /note="Description of Artificial Sequence: Synthetic coding sequence"
  source 1..1422: mol_type = other DNA
atggccgttatggccccccggacccttgttctgctgttgagcggcgcactcgctctcacgcagacttgggctcaagtgacccttcgggagtcaggaccagccctggtgaagccgacacagaccctgaccctaacgtgcaccttctctggattctctctgagcacttccggaatgtccgttggatggattaggcagccacctgggaaagccctggagtggctggccgatatctggtgggatgataagaaagattacaacccgtccctaaagtccaggttgaccatcagcaaagatacaagcaagaaccaggtggtcctgaaggtgacgaacatggatcctgctgacactgctacctattactgcgctcgctctatgatcactaattggtattttgatgtatggggggccggtacaaccgtgaccgtaagctccgcatccacgaagggtccctccgtcttccctctggcgccaagtagtaagagcacaagcggagggaccgccgcattgggatgtctggtaaaggactacttccctgagcctgttacagtttcctggaattcgggcgctctgactagtggagttcacacattccccgccgtgctgcagtcgagcggcttgtacagtctctctagcgtagtcactgtaccttcatcttctttgggcacacagacgtatatttgcaacgtcaatcacaagccatctaataccaaggtagataagcgggttgaacctaagagttgcgataagacccacacttgcccgccttgtccagcgccagaactgctgggcggtccctctgtttttttgtttcccccaaaacccaaagatactctgatgattagccggactcctgaggttacttgtgtcgttgtggacgtttctcatgaggatccagaagtgaaattcaattggtatgtcgacggtgttgaggtccacaatgcaaaaacgaagccaagggaggagcagtacaactcaacttaccgcgtagtttctgtgcttacagtgctacatcaggactggctcaatggtaaagagtataaatgtaaggtatccaataaagcactgcccgccccaatagaaaaaactatctcgaaggctaagggacaacctagggagccacaagtttatacgctgccaccgtcccgagaggaaatgaccaaaaatcaggtgtcgctgacctgcctggttaaggggttctacccttccgacattgcagtggaatgggagtcaaacggtcaaccagagaacaactacaaaacaacgccgcctgtgctggatagcgacggcagtttctttctgtactcaaagctgacagtggataagagccgctggcaacaagggaatgtgttctcctgcagcgtaatgcacgaggccctccacaaccactacactcagaagtctctgtcgttgagcccaggaaag

SEQ ID NO: 15874 - DNA, 1422 bp, synthetic construct
  misc_feature 1..1422: note = source = /note="Description of Artificial Sequence: Synthetic coding sequence"
  source 1..1422: mol_type = other DNA
atggcagtgatggcccctcggaccctggtgctcctgctgtcaggagctctcgccctcacccaaacctgggcacaagtcactctgagagaatcaggtccggctctggtcaagcctactcagacccttaccctcacgtgtaccttctccggattctccctgtcgacctccggaatgtcggtgggatggattagacagccacccggcaaggcgctggaatggctcgccgacatctggtgggacgataagaaagattacaacccctcgcttaaatcgcggttgaccatcagcaaagatacttccaagaaccaggtggtgctgaaggtgactaatatggacccggcagacactgccacttactactgtgctcggtcaatgatcaccaactggtacttcgacgtttggggagcaggaaccaccgtcactgtgtcatcggctagcactaagggaccgtcggtgttcccgttggccccttcctcgaagtcgacctcgggaggcacggccgcgctcggatgcctggttaaggactacttcccggagcctgtgaccgtgagctggaactccggggcgctgacgtccggagtccacacctttccggcggtgctgcagtcgagcggactctacagcctgtcgtcggtggtgacggtcccctcctcgagcttgggaacccagacttacatctgtaatgtcaaccataagccaagcaacactaaggtcgataagagagtcgaaccaaaatcctgtgataaaactcatacctgcccgccgtgccctgcgccagaactcctcggaggcccatccgttttcctgtttccgccgaagccgaaggatactcttatgatatctcgtacgcccgaggtgacttgcgtcgtggtggatgtttcacacgaggaccccgaggtgaaattcaattggtatgttgacggcgtggaggtccacaatgccaaaacgaaaccgcgcgaggaacagtataactcaacctaccgggtggtgtcggtgttgaccgtgctgcatcaggattggcttaacggaaaggagtacaagtgcaaagtctcaaataaggccctgccagccccgatcgaaaagacgatctccaaagcaaagggacagccgagggagccgcaggtctacaccctcccgccaagccgggaagaaatgactaagaaccaagtgtccctgacttgcctggtcaagggattctacccctcggatattgctgtggagtgggaaagcaacggacaaccggaaaacaattacaaaaccactccaccagtgctggactcggacgggagctttttcctttactctaagctcaccgtcgacaagtcacgctggcaacagggaaacgtcttttcgtgttccgtcatgcacgaggccttgcacaatcattacactcagaagtccctctcgctttcccccggaaag

SEQ ID NO: 15875 - DNA, 1422 bp, synthetic construct
  misc_feature 1..1422: note = source = /note="Description of Artificial Sequence: Synthetic coding sequence"
  source 1..1422: mol_type = other DNA
atggcggtgatggctccgcgtaccctggtgctgctcctcagcggagcactggcgctgacccagacctgggctcaagtgaccctccgagagagcggaccggccttggtgaagccaacccagactctgacgctcacctgcacgttttccgggttctctctgagcacctccggcatgtcggttgggtggattcgccagccgcccggaaaagcgctcgagtggctggcggatatctggtgggacgataagaaggattacaacccgtcactcaaatcgcgcctgaccatctcgaaagacacttcaaagaatcaagtcgtcctgaaggtaaccaatatggaccctgccgatactgccacctactactgtgcacgcagcatgataactaactggtacttcgacgtctggggcgccggtaccactgtcacggtgtcctccgcgagcaccaaaggtccgtcagtgttcccgctcgcgccttcttcgaagtcaacgtcgggtggcacggccgcgcttggctgccttgtgaaagactacttccccgaacccgtgaccgtgagctggaactccggcgctctcacttccggagtccatacctttcctgcagtcctgcagagcagcggactgtactccctctcaagcgtcgtgactgtgccgtcctcgagccttggaactcaaacttacatctgcaacgtaaaccacaagccgtcgaacactaaggtcgataagagggtcgaaccgaaatcttgtgacaaaacgcacacttgcccgccttgcccggcccctgaacttctgggaggtccgtcggtgtttctgttccccccaaaacctaaggataccttgatgatctcgcggaccccagaagtcacctgcgtcgttgtggacgtgtcacatgaggatccggaagtgaagttcaactggtacgttgacggcgttgaggtgcacaatgccaagaccaaacctcgggaagagcaatacaacagcacgtaccgcgtagtgtccgtcttgaccgtccttcatcaggactggctgaatggaaaggaatacaaatgcaaggtgtccaacaaggctcttccggcaccgattgaaaagaccatctctaaagccaagggacagccaagggagccgcaggtgtacaccctcccaccatcgagagaagagatgacgaagaatcaggtgagcctgacttgcctggtgaaagggttctacccatcggacatcgcggtcgagtgggaatcaaatgggcaacccgagaataactataagactactccaccagtcctggattcggacggtagctttttcctgtattcaaagttgaccgtggacaagtcaagatggcaacaggggaacgttttctcgtgttccgtgatgcacgaggcgctgcacaaccattacactcaaaagtccctgagcttgtctccaggaaag

SEQ ID NO: 15876 - DNA, 1422 bp, synthetic construct
  misc_feature 1..1422: note = source = /note="Description of Artificial Sequence: Synthetic coding sequence"
  source 1..1422: mol_type = other DNA
atggcggtgatggcaccgagaaccctggtactgctactctccggcgctcttgccttgacgcagacatgggcccaagtcaccttgcgcgagtccggacccgccctagtcaaaccgacccagaccttaaccttaacttgtaccttctctggctttagtctctcaacttccggaatgtctgtgggctggatacggcagcccccaggaaaagctcttgagtggcttgccgatatctggtgggacgacaagaaagactacaatcctagtctgaaatctcggctgacaattagtaaagatacatcaaagaatcaggtggttctgaaggtgaccaacatggatccagctgataccgctacatactactgtgccagatcaatgattaccaattggtattttgatgtatggggcgccggaactacggtaacggtgagcagtgcctcgactaagggtccctcagtctttccacttgccccatcctcaaagagtacatccgggggtacagcagcactgggctgcttggtcaaagattacttccctgagcccgttactgtttcctggaactcaggggcgttgacctctggagtgcatacatttcccgcagtactgcaatcatccggtctctactccctttcttcagtggtgactgtcccctcctcctccttgggcactcagacgtacatttgtaacgttaatcacaaaccctcaaatacaaaagtggataaaagagtggaacccaaatcttgtgataaaacccatacctgccccccctgccctgcacccgagctgctgggcggaccttccgtgttcctgtttccacctaagccgaaggacacgctgatgatctctcgcactccagaagtaacctgcgtcgtcgtagacgtttcgcatgaggatcccgaggtgaaatttaactggtatgtagacggtgtagaagtccataatgcgaagactaagccgcgggaggagcagtataacagcacttaccgcgtggtctcggtcctcacggttctgcatcaggattggctcaacggcaaggagtacaaatgcaaggtgtccaataaagctctaccagcaccaatcgagaagaccatctcaaaagccaaaggacagccccgcgagccacaggtgtataccctgcctcctagcagagaggagatgacaaaaaaccaagtgagcctcacgtgtctcgtcaagggcttttacccctccgatatcgcagtggaatgggaaagcaatggacagcccgagaataattacaaaacgaccccgcccgttctcgactctgatggatcattcttcctatacagcaagctgaccgtggataaatcaaggtggcagcaaggaaatgtattctcctgttcagttatgcacgaggccctgcacaaccattatacacaaaagtccctatcactgagccctgggaag

SEQ ID NO: 15877 - DNA, 1422 bp, synthetic construct
  misc_feature 1..1422: note = source = /note="Description of Artificial Sequence: Synthetic coding sequence"
  source 1..1422: mol_type = other DNA
atggcagtgatggcaccaaggacgctggttctgctcctgtcaggagctctggccctgactcaaacctgggcccaagtcactctgcgggaatcgggaccggcactggtcaagccgactcagaccctgacccttacctgcaccttcagcggattttctctgtcaacgtccggaatgagcgtcggctggatccggcaaccgcccgggaaggcgttggaatggctcgcagacatctggtgggatgataagaaggactacaatccttcgctgaagtcgcgccttaccatctcaaaagatacctccaaaaatcaggttgtgttgaaagtcacgaacatggatccagcagatactgctacctactactgtgctaggtccatgatcaccaattggtacttcgacgtgtggggggccggtactaccgtcacggttagctcggcgagcactaagggaccgtcggtgtttccgctggccccatcatccaagtcgacgtccggcggcacggccgcccttggatgcttggtgaaggactacttcccagagccggtgaccgtctcctggaactcgggtgcccttacttcaggtgtccacacctttccggccgtgctgcagtcatccggactctactccctctcatcggtggtcaccgtcccgtccagctctctcgggacccagacgtatatctgcaacgtgaaccacaagccgtccaataccaaggtggacaaacgcgtggagcctaagagctgcgacaaaacgcatacctgcccaccttgtcccgccccggagctgcttggaggaccctcggtctttctcttcccaccgaagcctaaggatactctcatgatcagccgcacccccgaggtgacctgcgtggtggtggacgtgtcgcatgaggatccggaagtgaagttcaactggtatgttgacggagtggaggtgcacaatgcaaagactaagcccagagaggaacagtacaatagcacttatcgggtggtcagcgtgttgactgtcttgcatcaagactggctcaacggaaaggagtacaagtgcaaagtttccaacaaggccctgccagccccaatcgaaaaaaccatctcgaaagccaagggacagccacgcgaacctcaggtctacactctccctccgtcgagagaggagatgaccaaaaaccaagtctcgctcacttgtctcgtgaaaggtttttacccgtccgacatcgcagtcgaatgggaatccaatgggcaaccggagaacaactacaaaactacccctcctgtgctggactcggacggctcgttcttcttgtactctaaactgactgtggacaagagccggtggcaacagggaaacgttttcagctgcagcgtgatgcatgaagctctgcacaaccactatactcaaaagtccctgtccctgtcgccgggaaaa

SEQ ID NO: 15878 - DNA, 1422 bp, synthetic construct
  misc_feature 1..1422: note = source = /note="Description of Artificial Sequence: Synthetic coding sequence"
  source 1..1422: mol_type = other DNA
atggctgttatggcgcctcggacgctggtcctcctgctctccggcgccctggcactcacccaaacctgggcgcaggtgactctgcgcgaatcaggtccagcactggtgaaaccgactcagacgctcacgctgacctgtaccttctcaggtttctcgctctcaacctcggggatgtcagtcggatggatcagacagccaccagggaaggcccttgagtggctggctgatatctggtgggatgataagaaggattacaacccctctctgaaatctcggctgaccatttcgaaggatacgagcaaaaaccaagttgtgctcaaggtgactaacatggaccctgcggatactgccacctactactgtgcacggagcatgatcactaattggtacttcgacgtgtggggagcaggaaccactgtgaccgtctcgtctgcttccactaagggaccgagcgtgttcccgcttgcaccttcatccaagagtacctcaggcggcactgccgcgttgggatgccttgtgaaggactacttcccggagcctgtgactgtgtcctggaattcgggagcgctgacctcaggcgtgcacacgtttccagccgtgttgcagtcctccggactgtattccctgagctccgtggtgaccgtgccgtcgtcctcgcttggcacgcaaacttatatctgcaatgttaatcataaaccatcgaacaccaaggtggacaaacgggtcgaacccaagtcatgcgacaagactcacacttgtccgccatgcccagccccggaactgctgggaggaccgtccgtgttcctgttcccgccaaaacctaaggacacgctgatgatctcacggacgcccgaggtcacttgcgtggtggtcgacgtttcgcatgaggaccctgaggtgaaattcaattggtacgtggatggagtggaggtccacaacgcaaagactaagccgcgggaagaacaatacaattcgacctaccgagtggtcagcgtgctcactgtcctccatcaggactggctcaacggaaaggaatacaaatgcaaggtgagcaataaagcactcccggcaccgatcgaaaagactatctccaaagctaaagggcagcctagggaacctcaagtgtacaccctgccgccgagccgggaggaaatgaccaaaaatcaagtgtccctcacgtgcctggtcaaggggttctatccgtccgatatcgccgtcgagtgggagtccaatgggcagccggagaacaattacaagaccactcctcctgtgctcgactcggacgggtccttttttctctacagcaagctgacggtcgataagtcccgctggcaacaaggaaacgtgttctcgtgctccgtgatgcacgaggcactccataaccactacactcaaaagtccctgtcgctgtccccaggaaaa

SEQ ID NO: 15879 - DNA, 1422 bp, synthetic construct
  misc_feature 1..1422: note = source = /note="Description of Artificial Sequence: Synthetic coding sequence"
  source 1..1422: mol_type = other DNA
atggcggtgatggctccgcgcaccctggtcctcttgctcagcggagcgctggcgctgacccagacctgggcgcaggtaaccctgagagagagcggaccggcactggtgaagccaacccaaaccctgacgctcacgtgcaccttttcgggcttctcactctccacctccggaatgtcagtgggatggatcagacagccgcccggaaaggcccttgaatggctcgcggatatttggtgggacgacaagaaggattacaacccatcactgaagtcccgcctcaccatctcgaaggacacctccaagaatcaggtggtcctgaaggtgactaacatggacccggcagataccgcaacctactactgcgcacggtccatgatcaccaactggtacttcgatgtctggggagccggcactaccgtcactgtctccagcgccagcactaagggtccgagcgtgttcccgctggccccatcgtccaagtcgacctcgggcggcactgccgcacttggatgccttgtgaaggattacttcccggagccggtgactgtgtcgtggaactcaggcgcgctcacctcgggagtgcacaccttcccggcggtgcttcagtcgtccggattgtacagcctgtcgtcggtggtgaccgttccgtcctcttccttgggaacccagacctacatctgtaatgtgaatcataagccctccaacaccaaggtggataagcgggtggaacctaagtcgtgcgacaagactcatacttgtcctccgtgtccagcccccgaactgctgggcggccccagcgtgttcctgttcccaccaaagccaaaggatactctgatgatctcacgcacccctgaagtgacttgtgtggtggtggatgtgtcccacgaggaccccgaggtcaagttcaactggtacgtggatggcgtcgaggtgcataacgccaaaaccaagccacgcgaagaacaatacaactccacttaccgcgtggtcagcgtcctgactgtgcttcaccaagattggctcaatggtaaggagtataagtgcaaggtgtcaaacaaagctctcccggccccgatcgaaaagaccatctcgaaagcaaaaggacagccacgcgaaccgcaggtgtacacgttgccgccgtcgcgggaggaaatgaccaagaaccaagtctccttgacctgcttggtgaaaggattctacccgtccgacattgccgtggaatgggaatccaacgggcaaccggagaataactacaaaactacgcctccagtcctcgactcagatggatcgttcttcctctatagcaaacttactgtggacaagtcgcgctggcagcagggaaacgtgttttcatgctcagtgatgcacgaagccctgcacaatcattacactcaaaagtcgctgtcgcttagcccggggaag

SEQ ID NO: 15880 - DNA, 1422 bp, synthetic construct
  misc_feature 1..1422: note = source = /note="Description of Artificial Sequence: Synthetic coding sequence"
  source 1..1422: mol_type = other DNA
atggccgttatggctccacgaacgttggtgctgttgctgtctggagcacttgcacttacacaaacatgggcacaagttaccttacgagagagtggaccagctctagtaaaaccaacacagactctgacactaacgtgcactttcagtggcttttccttgagcactagtggaatgtcagttggttggatcagacagccgccaggcaaagcgttggagtggcttgcagacatttggtgggacgataaaaaagactacaacccttcacttaagtcacgactgaccattagcaaagatacttcaaagaatcaggttgtcctgaaagttacgaatatggaccctgcagatacggctacatattattgtgcgcggtccatgattactaattggtatttcgacgtctggggtgcaggaacgaccgtaaccgtgtccagcgcatcgactaaaggcccgtctgtgttcccgttagcaccatcgtcaaaatcaacctcggggggaacagcggcactgggatgtctggtcaaagattatttcccagaacccgtcactgtttcatggaactccggagccttgacttccggagttcacactttcccagcggttctccaatcaagtggactatactcgctgagcagcgtagtgactgtcccttctagttcactgggaacacaaacttatatatgtaatgtgaatcataagccttccaatacgaaagtagataagcgagtagaaccgaaatcatgtgataaaacacacacctgcccaccttgcccggctccagagctgttggggggaccatcagtatttttgtttccaccaaaaccaaaggatactcttatgatctcccgcacgccagaagttacgtgtgttgtagttgacgtttcacacgaagacccggaagtgaaatttaattggtatgttgacggagtcgaagtccacaatgctaagactaaaccacgtgaagaacaatacaattcaacataccgggtcgtgtcagtactgaccgtgttgcatcaggattggcttaacggaaaagaatataagtgtaaagtgtctaataaagccctcccagccccaattgaaaagacaattagtaaagccaagggacaaccccgtgaaccacaagtttacacgctaccaccttcccgtgaagaaatgacaaaaaatcaagttagtctcacttgcttagtgaaaggattctaccctagtgacatagcggttgaatgggaatctaacggtcaacctgaaaataattacaagacaacaccaccagttttggattctgacggatccttttttttgtattccaaactcactgttgataagagtcgatggcaacagggtaatgttttttcttgttcagttatgcatgaagcgctgcacaaccattacactcaaaaatcactttcactgtcgccgggaaag

SEQ ID NO: 15881 - DNA, 1422 bp, synthetic construct
  misc_feature 1..1422: note = source = /note="Description of Artificial Sequence: Synthetic coding sequence"
  source 1..1422: mol_type = other DNA
atggctgtcatggcccctcggaccttggttttattgctatcaggagcgctggccctgacccaaacttgggcgcaggtgacactgagagaatcaggccctgcattagtgaaacctacgcagaccctgaccttgacctgcactttcagtggtttttcccttagtacctctggaatgtcagtcggttggatcaggcagcctcctgggaaagccctggagtggctggctgatatctggtgggacgacaaaaaggactataacccctccctgaaaagccgcttgaccatttccaaagataccagtaagaaccaggttgtgctgaaggtcaccaatatggatccagccgacactgctacctactattgtgcgcggagcatgattactaactggtacttcgacgtgtggggggctggtacaacggtgacagtctctagcgctagcaccaagggtccatccgtattcccgttggccccgtccagcaaatccacaagtggtggaaccgccgcactgggctgcctggtgaaggattacttccccgaacccgtgacagtgtcctggaattctggcgcacttacatccggggtgcacaccttcccagccgtgctgcagagctccggactgtatagcctttccagcgttgtcactgtgccaagttcctccctgggaacacaaacgtacatctgcaacgtcaaccataagccaagcaataccaaggtggacaagcgagtggagcctaagtcatgcgacaaaactcacacctgcccaccatgccctgctccagaactgctgggcggccccagcgtattcctctttcctcctaagcctaaggacacccttatgattagcaggacacccgaggtgacctgcgtcgtggtggacgttagtcacgaggaccccgaggtcaaattcaattggtacgtagacggagtggaggtccataacgctaagactaaaccgcgggaggaacagtacaattcaacgtatagggtagtttctgtgctaacggtgctgcaccaggattggttgaatggtaaggaatacaaatgcaaggtgagcaataaagctttgccagctccaatcgagaaaacgatttcaaaagctaagggccagcccagagagccccaagtatacaccctccctccctcaagggaggagatgacgaagaaccaggtttccctcacatgcttggtcaagggcttttatccgtccgatattgcagttgagtgggaaagtaatggccagcccgaaaacaactacaagacgaccccaccggtactggacagcgacggctcattttttctttatagtaagctcactgtggataaatcccgatggcagcagggcaacgtcttctcctgctcagtaatgcatgaggctttgcataaccactacacacagaaatccctgagcttatcacctggcaag

SEQ ID NO: 15882 - DNA, 1422 bp, synthetic construct
  misc_feature 1..1422: note = source = /note="Description of Artificial Sequence: Synthetic coding sequence"
  source 1..1422: mol_type = other DNA
atggctgtgatggccccaagaaccctggtgctgctgctgtccggagctctggcgctgacccaaacctgggctcaggtgactctgagagaatcaggtcctgcccttgtgaagcctactcaaacgctgactctgacgtgcaccttcagcggcttcagcctgtctacttcggggatgtccgtcggatggatccggcagccaccagggaaagcactggaatggttggccgacatctggtgggatgacaaaaaagactataacccgtcacttaagagccgccttacgatcagcaaggacacctcaaaaaaccaagtggtcttgaaggtgaccaatatggaccctgcggataccgccacctactactgcgcccgctcgatgatcactaattggtacttcgatgtttggggggccggtactactgtcacggtgtcgtcggcaagcaccaagggaccatccgtgtttccattggcgccgagctcgaagagtactagcggcggtaccgcggcactcgggtgtctggtgaaggattactttccggagcctgtgaccgtgtcgtggaactcaggagctctgacttccggagtgcacaccttccctgctgtgctgcagtcgtcaggactctacagcttgagctccgtcgtgaccgtgcctagctcctcgttgggaacccagacctacatctgcaacgtcaatcacaagccgagcaatacgaaagtggataagcgcgtggaaccaaaatcctgcgacaaaacccatacctgcccgccatgcccggctccggagctcctgggcggaccatcagtgtttctgtttccacccaagccgaaggacactctgatgatctccagaaccccagaagtgacctgcgtggtggtggacgtcagccacgaggaccctgaggtaaagttcaactggtacgtcgacggagtggaggtgcacaacgccaaaactaaaccacgcgaagaacagtacaactccacttaccgggtggtgtctgtgttgactgtgctgcatcaggactggctgaacggaaaggaatacaagtgcaaggtgtcgaacaaggctctccccgcgccgatcgaaaagaccatttctaaggccaagggacagccgcgcgagccgcaagtgtacactctgccaccttctcgcgaggagatgacgaagaaccaagtgtcgctgacctgtctcgtcaaaggcttttacccgtcagatatcgccgttgagtgggaatcgaacgggcagcctgaaaacaactacaagacgaccccgcccgtgctggatagcgacggatcgttcttcctgtactccaagctcactgtcgataagtcacgatggcagcagggaaacgtgttcagctgtagcgtcatgcacgaagcactgcacaaccattacacccaaaagtcgcttagcctctcaccaggcaag

SEQ ID NO: 15883 - DNA, 1422 bp, synthetic construct
  misc_feature 1..1422: note = source = /note="Description of Artificial Sequence: Synthetic coding sequence"
  source 1..1422: mol_type = other DNA
atggccgtgatggctccgcgaaccctcgtcctcctgttgtctggcgccttggccctgacccagacttgggcgcaggtgaccctgagagaatctggacccgctttggtaaagccaacacagaccctgacccttacctgcactttttccgggttttctctgtctacctctggtatgtcagtgggatggatccggcagccacctggcaaggcactcgagtggctcgcagacatttggtgggatgataagaaggactacaacccttcactcaagagtcggctgacgataagtaaggatacaagcaagaatcaagtggtcctgaaggtaactaatatggaccccgccgacactgctacctattattgcgccagatccatgatcactaattggtattttgacgtgtggggcgctggcactacagtaaccgtcagtagcgcctcaactaaaggcccttctgtgttcccactggccccctccagcaagagcaccagcggcggtacagcagccctcggctgccttgtcaaagattattttccagaacccgttactgtaagctggaatagcggagctcttacatcaggagtgcacaccttccccgctgtcttgcagtcctctgggctgtattcactgtcatctgtagtgacagtgccaagtagctccctcggcacccagacgtacatctgcaatgtaaaccacaagccctctaacacaaaagtggataagagggtggagcctaagtcttgcgataagacacatacgtgtcccccttgtcctgcaccagagctgctgggcgggccctccgtgtttctgttccctcctaagccgaaagatacgttgatgatatctcggaccccagaagttacgtgcgttgtggtcgatgtatcccacgaggaccccgaggtcaagtttaactggtatgtggatggcgttgaagtccacaacgctaagaccaaacctcgcgaggagcagtacaacagtacctaccgggtggtgtctgtgttgaccgtgctgcaccaggattggctgaacgggaaggagtataagtgcaaggtctccaacaaagcacttccagctccgatcgagaagaccatttcaaaagctaagggccagccaagggagccccaagtgtatacgctgcccccctccagggaggagatgaccaagaatcaagtttccctgacatgcctggttaagggcttttacccctctgacatcgctgtagagtgggagagcaacgggcaacccgagaacaactacaaaactacacctccggtcctggactccgacgggtccttttttctctattctaaactcactgttgataagagccgctggcaacaggggaacgtcttctcttgtagcgtcatgcatgaggcattgcataatcattacacccagaagagcctttcccttagccccgggaag

SEQ ID NO: 15884 - DNA, 1422 bp, synthetic construct
  misc_feature 1..1422: note = source = /note="Description of Artificial Sequence: Synthetic coding sequence"
  source 1..1422: mol_type = other DNA
atggcagtgatggcgccacgtactttggtcctgctgctgtccggagcactggctctcacacaaacttgggcgcaggtgacattgcgtgagtcagggcccgccttagtcaagcctacccagaccttgactctgacgtgtaccttcagtggatttagcttgagtaccagcgggatgtcagtgggttggattagacagccccctggcaaggccttggagtggctggcagatatctggtgggacgataagaaggactataatccatccttaaaatccagacttactatctctaaggacacaagcaagaaccaggtggtgctgaaggtgaccaatatggatccagcagataccgccacatactactgcgcccgaagcatgatcaccaactggtattttgatgtctggggggccggtacaactgtcaccgtatccagcgccagcactaagggaccgtcagtattcccattggcccccagctccaaatccacctccggcggcacagccgccctaggctgcctcgttaaggattacttcccagagcccgtgacggtgtcatggaactccggagccctcactagtggagttcatacgttcccagcagtcctgcaaagctctggtctgtatagcctaagctctgtagtcacagttcctagtagctcgttgggaacccagacatacatttgtaacgttaatcacaagcccagcaatacaaaagtcgataagagagtagaaccaaagagctgcgacaagacccacacatgtccgccttgtcctgctcccgagctcctgggaggacctagcgtgtttttgttcccgccgaagcctaaggacacacttatgatctctaggacgcccgaggtcacatgtgtcgtggtggacgtgagtcatgaggaccccgaggtcaagttcaactggtacgtggatggagtggaggtacacaacgccaagacaaagccaagagaagaacagtacaattctacataccgcgttgtgtcggtgttaactgtgctgcaccaggattggctgaatgggaaggagtataaatgcaaggtgtcgaacaaggctctgcccgcaccgatcgaaaagacaatatccaaggccaaaggccagccacgcgagcctcaagtgtacacgctaccacctagtcgggaagaaatgactaagaaccaggtgtcactgacctgcctagtgaagggtttctacccttctgatatagctgtggagtgggaatcaaacggccaaccagagaacaactacaagaccaccccccctgtgctcgactcagatggctctttcttcctctattccaagttgactgtggataagtctcgctggcaacaggggaacgtgtttagttgcagtgttatgcatgaggctctccataatcactacacgcagaagagcctgtcattgtccccaggcaaa

SEQ ID NO: 15885 - DNA, 1422 bp, synthetic construct
  misc_feature 1..1422: note = source = /note="Description of Artificial Sequence: Synthetic coding sequence"
  source 1..1422: mol_type = other DNA
atggccgtgatggccccccgcaccctggttctgttgctttcaggtgccctcgccttgacccagacatgggcccaggttactcttagagagtccggcccagcactagtgaaaccgacccaaacacttaccctgacctgtaccttcagcggattttccctttctacttcaggtatgtctgtcggctggatcagacaacctccaggtaaagccctggaatggctggcagacatctggtgggatgataagaaggactataaccccagcctgaaaagtcggcttacgatttctaaggatacctcaaaaaatcaggtggtcctgaaggtgactaatatggatcccgctgatacagcaacttattactgcgcccgtagtatgatcacgaattggtactttgatgtatggggcgccggaactaccgttacagtctcctctgcttctacaaagggtccgtccgtcttccccctggcccctagctctaagtctactagtgggggcactgcagctctggggtgtcttgtcaaagactatttcccagaaccagtgacggtcagctggaacagcggcgctcttacatccggagtccacactttccctgccgtgctccagtcatccggcttgtattctctgtcctccgtggtgaccgttccgtcgtcctccctaggtactcagacatatatctgtaatgtgaatcacaaaccgtcgaatactaaagtggacaagagggtggaacccaagtcctgcgataaaacgcacacgtgcccgccttgtcctgcacctgaactcctgggtggccccagcgtgttcctgttccctccaaagcctaaagatacacttatgatctccagaactcctgaagtgacatgcgtagtggtcgacgtcagccatgaggaccccgaagtgaagttcaattggtatgttgacggcgtcgaggttcacaatgcaaagactaaaccaagggaggaacagtacaattctacatatagggtcgtcagtgtattgacggtgctccatcaggactggttgaatgggaaggaatacaaatgtaaagtttcaaacaaggccctgcctgctcctatagaaaagaccataagtaaagccaaaggacagccgagggaacctcaggtgtatactctgccccctagcagggaagagatgaccaaaaatcaggtgagtctaacctgtcttgtgaaggggttctatccatccgatattgctgtcgaatgggagagtaacggacagcccgaaaataattataagacgactccccccgttttagactctgacggctcctttttcctgtattctaagttgaccgtggacaaaagtcgatggcagcagggaaatgtattttcatgctccgtcatgcatgaagccttacacaaccactacacacagaaatcactgagtctatcccctggcaaa

SEQ ID NO: 15886 - DNA, 1422 bp, synthetic construct
  misc_feature 1..1422: note = source = /note="Description of Artificial Sequence: Synthetic coding sequence"
  source 1..1422: mol_type = other DNA
atggctgtaatggccccccgtactctcgtactgttgctttcaggagcattggccctcactcagacctgggcccaagtgaccctgagagaatctggcccagcactcgtaaagcctactcagactctgacattgacctgtaccttcagcggattctccctgtccacctcaggaatgtctgttggttggatacgtcaacctcccggcaaggccctggaatggctggcagacatctggtgggacgacaaaaaggactataaccctagtctcaaaagtaggcttactatcagtaaagacacatcaaaaaatcaggtggtgttgaaagtgaccaacatggacccagctgataccgccacctattattgcgcaaggtctatgatcacaaactggtattttgacgtctggggcgcaggaacaacagtgacagtgagcagcgcctccactaagggcccctccgtgtttcctctggccccctcctccaaatctacatccggtggcacagccgcattgggctgcctggtaaaggactacttcccagaaccagtcacagtgtcttggaactctggcgccctgacctcaggtgtgcacaccttccccgccgttcttcagagttcaggtctttactccctctcttccgttgtcacagtcccctcaagcagtctcggtacacagacctatatatgcaatgtgaaccacaagccttccaatacaaaagtggataaaagagtcgaacctaagtcatgtgacaagacacatacatgtccaccctgccctgccccagagcttttgggtggtccttcagtgttcctgttccctcctaagcctaaggacactctgatgatttcaagaacacctgaagttacttgcgtcgtagtcgatgtgagccacgaagatccagaggttaagttcaactggtacgtcgatggagtggaggtgcataacgcaaaaactaagccaagggaggagcagtacaattccacctatcgtgtagtgagcgtcctcacagtactccatcaggactggctgaatggaaaggagtataagtgtaaggtttcaaacaaggcactgccagctccaatagagaagacaatctccaaggccaagggccagccccgcgagcctcaggtttacacccttcctcctagtagagaggagatgacaaagaaccaggtaagcttgacctgtctcgtgaagggcttctatccctctgacatcgccgtcgagtgggagtccaatggtcagccagagaataactacaaaaccacacctccagtcctggactccgatggctcatttttcctctactcaaaactcacagttgacaagagtagatggcagcagggtaacgttttttcttgctctgtgatgcacgaggctctgcacaatcactacacacagaagtccctctcactgtctcctggcaaa

SEQ ID NO: 15887 - DNA, 1422 bp, synthetic construct
  misc_feature 1..1422: note = source = /note="Description of Artificial Sequence: Synthetic coding sequence"
  source 1..1422: mol_type = other DNA
atggcagtgatggcgccacgcaccctggtgcttttgctttccggagcactggcactgacccaaacttgggcacaggtcacgcttagagagtcgggacctgcgctcgtgaagccaacccaaacgctgactctgacttgtaccttttcaggattttcgttgtcaacttcgggtatgtcggtgggatggattcgccaacctccaggtaaggctctggagtggctggccgacatatggtgggacgacaagaaggattacaatccctcgcttaagtcgcggctgaccataagcaaggatacttcaaagaatcaggtggttcttaaagtgactaacatggaccctgcagatactgcaacttactactgtgcccgctcgatgatcactaactggtactttgacgtgtggggtgccgggactactgtgactgtgtcgtccgcatcgaccaagggaccttcggtttttccactggcgccttcatccaaaagcacttccggtggcacggccgcgttgggatgtctcgtgaaggactacttccccgaacctgtcacggtgtcctggaactcgggagcactgaccagcggagtgcatacgtttcccgcagtgcttcaatcgtccggtctttactcgcttagtagcgtcgtcactgtcccatcatctagcctgggcactcaaacctacatctgtaacgtgaatcataagccatcgaataccaaggtggacaagagagttgagcccaaatcctgtgataaaacccatacgtgccctccctgtcctgcccctgagctgttgggaggaccttcggtctttctgtttcctcctaaaccaaaggataccctgatgatttcacggacccccgaagtgacctgtgtggtggtggatgtgtcacatgaagatcctgaggtcaaattcaactggtacgtcgatggtgtcgaagtgcataatgcaaagaccaagcctcgggaagagcagtacaattcgacctatagagtggtttcggtcctgacggtgctccatcaagattggcttaacggaaaggaatacaagtgcaaagtctcaaataaggctcttccagccccgattgaaaagaccatttcgaaggcaaaaggccagcctcgagaacctcaggtttacactttgccaccttcgagggaagagatgaccaagaaccaggtgtccctgacctgccttgtgaaaggtttctacccatcagacattgcagtcgagtgggagtcgaatggccagcctgagaacaactacaaaactacgcctccagtgctcgattccgatggatcgttctttctgtactcaaagctgactgtggataaatcccgctggcaacaaggaaacgtgttttcatgttcggtgatgcacgaagccctgcacaaccattatactcaaaaatcgctgtcactgagccctggcaag

SEQ ID NO: 15888 - DNA, 1422 bp, synthetic construct
  misc_feature 1..1422: note = source = /note="Description of Artificial Sequence: Synthetic coding sequence"
  source 1..1422: mol_type = other DNA
atggccgtcatggccccaaggactctcgtcctgctgcttagtggggcacttgccctcactcagacctgggctcaggtaacccttagagagtcgggccctgccctggtcaagcctactcagactctgacgctgacttgcactttttcgggattttccctttctacctcaggtatgtccgtgggctggattcgccaaccccctggaaaggcactggaatggcttgcagatatttggtgggacgataagaaagactacaatccttcattgaagagtcggctgactataagcaaggacacgtcaaagaatcaggtggtcctgaaggtgactaacatggaccccgctgataccgcgacgtactattgcgcaagatcaatgattacgaactggtacttcgacgtgtggggagctggtaccaccgtgaccgtgagcagcgcatcgactaaaggaccttcggttttccccctcgcaccgtcgtcgaagtccacgagcggcggcactgcagcactgggttgtcttgtcaaagattacttccccgagccagttaccgtgtcgtggaactcaggcgcattgacctcaggggtgcataccttccctgcagtcctccaatcaagcgggctctactccctttcctcggtcgtaaccgtaccatcgtcatcgttgggaacccaaacctacatttgcaatgtgaatcataaaccttccaacacgaaggtggataagagggtcgagccaaaatcgtgtgacaaaactcatacctgtcctccatgtcccgcgcctgagcttttgggagggccgtccgtgtttctgtttccaccaaagcctaaggatactcttatgatcagccgtactccagaagtaacttgtgtggtggtggatgtctcacatgaagatccggaagtgaagtttaactggtatgtggacggtgtggaagtgcacaacgccaagactaagcctcgagaggaacagtacaattccacctaccgtgtcgtttccgtgctcactgttctccatcaggattggctgaacggaaaagaatacaagtgtaaggttagcaacaaagctctgcccgcaccgattgaaaagacgatctcgaaagcgaaaggacaacctcgagaacctcaagtctacaccctcccaccatcgagagaagagatgaccaagaaccaagtcagcctcacttgtctcgtgaagggattttacccatcggatatcgcggttgaatgggaatcaaatggtcaaccagaaaacaattacaaaactacgccgcccgtgcttgattcggacggatccttttttctttacagtaaacttaccgtggataagtcccgctggcaacaaggaaacgtgttcagctgctcggtgatgcacgaggcactgcacaaccattacactcagaagagcctttcattgtctccgggtaag

SEQ ID NO: 15889 - DNA, 1422 bp, synthetic construct
  misc_feature 1..1422: note = source = /note="Description of Artificial Sequence: Synthetic coding sequence"
  source 1..1422: mol_type = other DNA
atggccgtgatggcccccagaaccctggtcctcctgttgtctggagccctcgcactcactcaaacgtgggctcaggttactcttagggagtccgggcccgccctcgtcaaaccaacccagactcttaccctgacctgcacattctctggtttctcactgagcacatcaggcatgagcgtcgggtggatacgccaaccccctgggaaagccctggaatggcttgctgatatatggtgggacgataaaaaggattataatccaagcctgaagtccagactgacgatcagtaaggacacaagcaaaaaccaggttgtgctgaaggtcactaacatggatccagctgataccgccacatattactgcgcaaggtccatgatcactaattggtacttcgacgtctggggggccggtacaacagtgacggtgtcatctgccagcacaaaaggcccctccgtctttccccttgcccccagttctaaatccacatccggcggcacggctgcgctggggtgcctcgtgaaggactattttcctgagcccgtaacggtgtcatggaacagtggggcactgacctccggagtccacaccttcccggccgtcctgcagagctctggcctgtactccttgtcatccgtggttacggtgccatcatccagcctgggaacccagacttacatttgtaatgtgaatcacaagccttctaatacaaaggtcgataagagggtggaaccaaaatcctgtgataagacccacacatgcccaccatgtccggcccccgagctgctcggcggtccgagcgtctttctctttccccccaagcccaaggacaccctgatgatttccaggactcccgaagttacctgcgttgtggtcgacgtgtctcacgaagaccctgaagtcaaattcaattggtacgttgacggagtcgaggtgcacaacgcgaagactaaacccagagaagagcagtacaactccacctatcgcgtagtctcagtgcttacggtgctgcaccaggactggctcaacggcaaggaatacaagtgtaaggtttccaacaaggccttgccagcgcctatagaaaagacgatcagcaaggcgaagggtcagcctcgggaaccccaggtgtataccctgcctccatccagagaagaaatgaccaagaaccaggtgtctctgacctgtctggtaaagggtttctaccctagcgacattgcggtggaatgggaatcaaacggacagcccgaaaacaactacaagacaactcctccggtgttggactcagacggcagcttcttcctttattccaagctgacagtagacaagagcaggtggcagcagggcaatgtgttttcatgtagcgtgatgcacgaagctttgcataaccattacacacagaaatctctcagcctgagcccaggcaag

SEQ ID NO: 15890 - DNA, 1422 bp, synthetic construct
  misc_feature 1..1422: note = source = /note="Description of Artificial Sequence: Synthetic coding sequence"
  source 1..1422: mol_type = other DNA
atggctgttatggcaccacgaactcttgtacttcttttatcaggagcacttgcccttactcaaacatgggcacaagttactttaagagaatccggaccagctttagttaaaccaactcaaacattgactcttacatgtacatttagtggattttcactttcgacaagtggtatgtctgtgggatggatcagacaaccaccaggtaaggcattagaatggttagcagatatttggtgggatgacaagaaagattataatccatctctcaagtctagacttacaattagtaaagatacatctaaaaatcaagttgtattaaaagtaacaaatatggacccagcagatacagctacttattattgtgctagatctatgataacaaattggtattttgatgtctggggtgcaggaacaacagttactgtatcatcagcttcaacaaaaggaccaagtgtttttcctttagctccatcatcaaaaagtaccagtgggggaactgctgcattaggatgtctagttaaagactattttccagaaccagttactgtttcttggaattcaggtgctcttacttctggagttcatacttttccagctgttttacaaagttcaggtttatattcattatctagtgttgttactgtaccatcatcttctttgggaacacaaacatatatttgtaatgttaatcacaaaccatctaatacaaaagttgataaaagagttgagccaaaatcttgtgataagactcatacttgtccaccatgtccagcaccagaattattaggtggaccatcagtttttctttttccaccaaaaccaaaggatactcttatgatttcaagaacaccagaagttacttgtgtagttgtcgatgtttcacatgaagatccagaagtaaaatttaattggtatgttgacggggtagaagtgcataatgctaagactaagccaagagaagaacaatataattcaacatatagagttgttagtgttttaacagttcttcatcaagattggttgaatggaaaagaatataaatgtaaagtctcaaataaagctttaccagcaccaattgaaaaaacaatttcaaaggcaaaaggacaaccaagagagccacaagtgtatactttaccaccatctagagaagaaatgacaaagaatcaagttagtctaacttgtttagtcaaagggttttatccatctgacattgcagttgaatgggaaagtaatggacaaccagaaaataattataaaacaacaccaccagttcttgatagtgatggaagtttttttttatattccaaacttactgtagataaaagtcgatggcaacaaggaaacgttttttcatgttcagttatgcatgaagcattacataatcattatactcaaaaaagtttaagtttaagtccaggaaaa

SEQ ID NO: 15891 - DNA, 1422 bp, synthetic construct
  misc_feature 1..1422: note = source = /note="Description of Artificial Sequence: Synthetic coding sequence"
  source 1..1422: mol_type = other DNA
atggctgtcatggcacccagaaccctggtgcttttgttgtcaggcgccctcgctctcacacagacatgggcccaggtgactttgcgcgagtccggcccggccttggtgaagcctacacagaccctgacactgacatgcactttcagtggtttcagtctgtcaaccagcggcatgagcgtggggtggatcagacagccacccggaaaggccctggaatggctggccgacatatggtgggacgacaagaaggactataaccccagcctgaagtcccgactgaccatcagcaaagacacaagtaagaaccaggtggtcctaaaagtgaccaatatggaccctgccgacacagcgacatattactgtgccaggtctatgattacaaattggtacttcgacgtgtggggggcgggtaccacggtgacagtgtcctccgctagcactaagggcccaagtgtgtttccgcttgccccttcttccaagagcaccagcggaggcactgcagcgctcgggtgtttggtcaaagactactttccagaaccggtgacagtgagctggaattctggcgcactgacttccggagtccacactttccctgccgtcttgcagtcctcgggactgtactctctctctagtgttgtaactgtcccatccagttccctcggtacacagacctatatctgcaacgtaaatcataagcccagtaataccaaggtagataagcgtgtggagcccaaaagctgtgataagacccacacatgcccaccctgccccgccccagagctgttgggcggccccagtgtctttctgtttcccccaaaacctaaagacacattgatgatctcacggacacctgaggtcacatgtgtcgtggtggatgtctcccacgaggatccagaggtgaaattcaactggtatgtggatggcgtggaagtgcacaatgcaaagacgaaaccccgggaagagcaatacaatagtacctaccgggtcgtttccgtcctgacagtactccatcaggactggctgaacggtaaggaatacaagtgcaaagtgtcgaacaaagctctccctgctccgatcgaaaagaccataagcaaagcgaaaggccagcctagagagccgcaggtttataccctgccacctagtagagaggagatgaccaagaaccaggtgagtctcacatgcctcgtgaaaggattttaccccagtgacattgccgtcgagtgggagtctaatgggcagcctgagaacaactacaagaccaccccaccagtgctggattctgatggaagctttttcctgtactctaagcttaccgttgataagtcaagatggcagcagggcaacgtgttcagttgttctgtcatgcacgaagcactccataaccactatactcaaaaatccctgtccctgagccccgggaag

SEQ ID NO: 15892 - DNA, 1422 bp, synthetic construct
  misc_feature 1..1422: note = source = /note="Description of Artificial Sequence: Synthetic coding sequence"
  source 1..1422: mol_type = other DNA
atggcagtgatggcgccgaggacccttgtcctgcttttgtctggagcccttgcactgacccaaacgtgggctcaggtgaccctgagagaatccggacctgctttggttaagcctactcaaactctgaccctcacttgtactttctcaggcttttcgttgtcaacctcagggatgtctgtgggatggatcaggcagccccctgggaaggcactggaatggctcgcagatatttggtgggatgacaagaaggattacaatccatcgttgaagtcacggctcacgatatccaaggatacctccaagaaccaagtcgtgctgaaagtgactaatatggacccggcagatacggcaacttactactgtgcaagatcaatgattacgaactggtacttcgatgtgtggggagcgggaaccactgtcacggtgtcgtcggcatccaccaagggcccttccgtgttcccactggctcctagctccaagagcactagcgggggaactgcagcactgggctgcctggtgaaagattactttccagagccagtcacggtgtcctggaactccggagcgctcaccagcggagtgcatactttcccagcagttcttcagtcgtcagggctttattcgctgtcgagcgtggtcactgtgccatcgagctcgctcgggacccagacgtacatttgcaacgtgaatcacaaaccgtcgaacaccaaggttgacaaacgtgtggaacctaagtcatgtgataagactcacacttgtcctccttgtccagcaccagagcttcttggaggcccctcggtgttcctgtttccaccgaaacctaaagacacccttatgatttcgcggactccagaagtgacctgtgtggtcgtcgacgtgtcgcatgaagatcctgaagtgaagtttaactggtacgtggatggagtcgaggtgcataacgccaagactaagcctagggaggagcaatacaatagcacttaccgtgtcgttagcgtcctgacggtcctccatcaagattggttgaacgggaaggagtacaagtgtaaggtgagcaacaaggccctcccagcaccgatcgaaaagaccatttcaaaggcaaagggtcaacctagagagccccaggtctacacccttccgccatcaagagaagaaatgaccaaaaaccaggtatcgttgacctgtcttgtgaagggcttttacccatcggatatcgcagtggaatgggagtcgaatggtcagcctgagaacaattacaaaacgacccctcctgtattggacagcgatggatcgtttttcctttactcaaaacttacggtggataagtcccgctggcaacaaggtaacgtctttagctgttctgtgatgcatgaagcattgcacaatcattatacccagaaatcactgagcctctcacctggtaag

SEQ ID NO: 15893 - DNA, 1422 bp, synthetic construct
  misc_feature 1..1422: note = source = /note="Description of Artificial Sequence: Synthetic coding sequence"
  source 1..1422: mol_type = other DNA
atggcggttatggcgccgcgtacgttagtactattactatcgggtgcgttagcgctaacgcaaacgtgggcgcaagttacgttacgagaatcgggtccggcgttagtaaaaccgacgcaaacgttaacgctaacgtgtacgttttcgggtttttcgttatcgacgtcgggtatgtcggttggttggatacgtcaaccgccgggtaaagcgctagaatggctagcggatatatggtgggatgataaaaaagattataatccgtcgctaaaatcgcgactaacgatatcgaaagatacgtcgaaaaatcaagttgtattaaaagttacgaatatggatccggcggatacggcgacgtattattgtgcgcgatcgatgataacgaattggtattttgatgtttggggtgcgggtacgacggtaacggtttcgtcggcgtcgacgaaaggtccgtcggtatttccgttagcgccgtcgtcgaaatcgacgtcgggtggtacggcggcgctaggttgtctagtaaaagattattttccggaaccggtaacggtttcgtggaattcgggtgcgctaacgtcgggtgtacatacgtttccggcggttttacaatcgtcgggtttatattcgctatcgtcggttgtaacggttccgtcgtcgtcgttaggtacgcaaacgtatatatgtaatgtaaatcataaaccgtcgaatacgaaagttgataaacgtgttgaaccgaaatcgtgtgataaaacgcatacgtgtccgccgtgtccggcgccggaactactaggtggtccgtcggtatttctatttccgccgaaaccgaaagatacgctaatgatatcgcgaacgccggaagtaacgtgtgtagttgttgatgtatcgcatgaagatccggaagtaaaatttaattggtatgtagatggtgtagaagtacataatgcgaaaacgaaaccgcgtgaagaacaatataattcgacgtatcgtgttgtatcggtactaacggttttacatcaagattggttaaatggtaaagaatataaatgtaaagtttcgaataaagcgctaccggcgccgatagaaaaaacgatatcgaaagcgaaaggtcaaccgcgtgaaccgcaagtttatacgttaccgccgtcgcgtgaagaaatgacgaaaaatcaagtttcgttaacgtgtttagttaaaggtttttatccgtcggatatagcggtagaatgggaatcgaatggtcaaccggaaaataattataaaacgacgccgccggtattagattcggatggttcgttttttctatattcgaaactaacggttgataaatcgcgatggcaacaaggtaatgttttttcgtgttcggttatgcatgaagcgttacataatcattatacgcaaaaatcgttatcgctatcgccgggtaaa

SEQ ID NO: 15894 - DNA, 1422 bp, synthetic construct
  misc_feature 1..1422: note = source = /note="Description of Artificial Sequence: Synthetic coding sequence"
  source 1..1422: mol_type = other DNA
atggcagtgatggccccccgaactctcgtattactcctctctggggccttggccctgacccagacctgggcccaggtcaccctgcgggaatctggtccagcactcgtgaagcccactcagaccctgacattaacatgtactttctcggggttcagcctgtccaccagcggaatgagtgtcggatggatccgccagcctccgggtaaggccctggagtggctcgccgatatctggtgggatgataaaaaagactataaccctagcttgaaatctaggcttactatctctaaagatacaagcaaaaaccaggttgtgctgaaggttacaaacatggatcccgccgatacggccacctactattgtgcccggagtatgattacgaactggtatttcgacgtgtggggagcagggacaacagtcacagtcagctctgcaagcacgaaaggtccgagcgtgtttcccctggccccctcttcgaagtctacgagcggcgggacagcagctctcggctgcctggtgaaggattatttccccgaacccgttactgtatcctggaatagtggagctttgacatctggcgttcatactttcccagccgtgctgcaaagctccggtctctacagcttaagttcagtcgttaccgtcccttcatcatcactggggacgcagacatatatctgcaatgtgaatcataaaccctccaacactaaggtggacaaaagggttgagcctaagtcttgtgataaaacgcacacgtgtccaccctgtcctgcccccgaactgctcggtggtccatccgtttttctgtttccaccaaaacctaaggacaccctgatgatcagcaggacccctgaggttacttgtgtcgtggtggacgtgagccacgaggaccctgaggtgaagttcaattggtatgttgatggagtcgaagttcacaacgctaagaccaagccccgagaagaacagtacaactcgacttatagggtggtgagcgtcttgacggtgctgcaccaagactggttgaacggaaaagaatataaatgcaaagtctcaaacaaagccctgcccgccccgattgagaaaaccatttcgaaggccaaaggacagccgagagaaccgcaggtgtatacactgccaccatccagggaagagatgacaaaaaaccaggtgtctctgacctgtttggtcaaaggattctatccttccgacatagccgtggaatgggagtccaatggccaaccagagaataattataagaccaccccccccgtgctcgatagcgacggtagtttttttctgtacagcaaattaaccgtcgacaagtcccggtggcagcaagggaacgtgttttcatgcagcgtgatgcatgaggccctccacaaccattatacccagaagagcctctccttgagtccgggaaag

SEQ ID NO: 15895 - DNA, 1422 bp, synthetic construct
  misc_feature 1..1422: note = source = /note="Description of Artificial Sequence: Synthetic coding sequence"
  source 1..1422: mol_type = other DNA
atggctgttatggcacctagaaccctcgtgttgcttttgtctggggcactcgcccttacacagacatgggctcaagtgacccttcgggagagcggcccagccttggtcaagcctacccagactctcactttgacctgtaccttcagcggcttcagtttatccacctctggtatgtcggtcggatggatccgccagccacctggcaaggcgctggagtggctggctgatatttggtgggacgataaaaaagactacaatccgtccctcaaatcccggctcactatttccaaggacacaagtaaaaatcaggtcgtactcaaagtgacaaacatggatccagctgacaccgccacctactattgcgcccggtccatgatcacaaactggtacttcgacgtctggggcgcaggtacaacggtgaccgtgagtagcgcttccaccaaaggaccttccgtgtttcccctggctcctagtagtaagtcgacgagcggtggcaccgccgcactaggctgcctcgtgaaagattatttccctgagcccgttactgtttcctggaactctggcgctctgacctccggggtacacacatttccggcagtgttgcagtctagcggcctctacagtctctcaagcgtcgtcacagtccccagctcatctctaggcacccaaacatatatttgtaacgtcaatcacaaaccttctaacaccaaagtcgacaagcgtgtggagcctaaaagttgcgacaaaacccatacctgtcctccatgtcccgcaccagaactgctgggggggcctagtgtatttctgttcccccccaaacctaaggacacactaatgatcagtcgcacccctgaggttacatgcgtggttgtagatgtgagtcacgaggacccagaggtgaagttcaattggtacgtggatggcgtagaagtccataacgcgaagactaagccaagagaggaacaatacaatagcacttacagggtggtctccgtacttacagtgctgcaccaggattggctgaacgggaaggagtataagtgcaaagtaagtaataaagctctgcctgctcccatagagaagactatttcgaaggctaagggtcagcctagggaaccccaggtttacactctcccaccctcacgcgaggagatgactaagaaccaggtttctttgacttgcctcgtgaagggtttctaccccagcgatatcgctgttgagtgggaaagtaatggccaacctgagaacaactataagaccacccccccagtgctcgatagcgatgggagcttttttctgtacagtaagctcactgttgacaaatcacggtggcaacaggggaacgtcttctcatgctctgtaatgcacgaggctcttcataaccactatacacagaaatccctgtcgctgagcccaggaaaa

SEQ ID NO: 15896 - DNA, 1422 bp, synthetic construct
  misc_feature 1..1422: note = source = /note="Description of Artificial Sequence: Synthetic coding sequence"
  source 1..1422: mol_type = other DNA
atggccgtcatggcacccaggactcttgtgctgcttcttagcggtgccctggccctcactcaaacttgggctcaggtaactttgcgtgaatcgggtccagcgctcgtcaagccaacccaaactctgactctgacctgcacgtttagcgggttctcgctgtcaacttccggaatgtccgtgggttggattcgacagccaccaggaaaagcgctggagtggcttgcagatatttggtgggacgacaagaaagactataaccccagccttaaatcgcgactgactatttccaaggataccagcaaaaaccaggtggtcttgaaagtgactaatatggacccagccgacactgccacttactactgcgctcgctcgatgattacgaattggtactttgacgtgtggggcgcgggaaccaccgtgaccgtgtcgtccgcaagcaccaagggacctagcgtgtttccactggctccgtcctcaaaatccacgtcagggggcactgcagcactggggtgtctggtcaaggactactttccagagccagtcaccgtgtcatggaattcgggagcccttactagcggcgtgcacacctttccagcggtcctccagagcagtggtctgtactccctgtcgtcagtggtgaccgtcccctcgtcatccctgggtacgcaaacttacatttgtaatgtgaatcataagcctagcaacactaaggtcgataagcgtgtggagcctaagtcgtgcgacaagactcatacctgtcccccttgcccagcgcctgaactgctcggtggtccaagcgtgtttcttttccctccaaagcctaaggatactttgatgatatcgagaaccccggaagtgacctgcgtcgtggtggatgtctcccatgaggaccctgaggtgaagttcaactggtacgtggatggagtggaagtgcacaatgccaagaccaaacctagagaagagcaatacaactcaacttacagagtggtttccgtccttaccgtgctgcatcaggattggcttaacggcaaggagtataagtgtaaagtctccaacaaagcactccctgctccgattgaaaaaacgatctcaaaggcaaaggggcaaccccgggagccgcaggtgtacactttgcctccatccagggaagaaatgactaaaaaccaggtatccctcacgtgcctggtcaaaggattctatccaagcgacattgctgtggaatgggagtcaaacggtcagcctgaaaacaactacaagaccaccccaccagtgcttgatagcgatggttcgttctttctttactcgaaactcaccgtggataaaagccgctggcagcagggtaatgtgttttcatgttccgtcatgcatgaagccctccacaatcattacacccaaaagtcgctgtccctgagccctggtaaa

SEQ ID NO: 15897 - DNA, 1422 bp, synthetic construct
  misc_feature 1..1422: note = source = /note="Description of Artificial Sequence: Synthetic coding sequence"
  source 1..1422: mol_type = other DNA
atggccgtcatggcaccaagaacgctcgtcctgctgctgagcggggcgctcgctctgacccaaacatgggctcaggttacactgcgcgaaagcggtccggcgttggtcaagccaacccagaccttgacactgacctgtaccttttcaggattttctctaagcaccagcggtatgagcgtaggttggatccgccagccaccaggcaaagcactggagtggctggcggatatttggtgggatgataagaaggattacaacccttcactgaagagccgtttgaccattagcaaggataccagtaagaatcaggtggtgctgaaggttacaaatatggaccctgcagacacagctacctattactgcgcgcgctccatgattaccaactggtacttcgatgtctggggtgccggaactaccgtgactgtgtcttctgcgagcacgaagggtccatcggtgttcccgctagctccttctagcaaaagcacctcaggtggtacggcggcgctgggttgcctggttaaagattatttccctgagccagtcaccgtttcctggaactccggcgccctgacctctggagttcatacgttccctgctgtgcttcaaagcagcggcttgtacagcttgtcttccgtagttaccgtaccgagcagcagcctgggtacacagacctatatttgcaatgtgaatcacaagccaagcaacaccaaggtagacaagcgagtagagccgaaaagctgcgataaaacccacacctgtcccccttgtccggctcctgagctgctgggtggcccttctgtgtttctgttcccaccgaagccaaaggacaccctgatgattagccgcacgccggaggtgacttgcgtagtggtggacgttagccacgaggatcccgaagtcaagttcaattggtacgtggacggtgtcgaggtgcataacgcgaaaaccaagccacgcgaggagcaatataattcgacctatcgggtcgtgtctgttctcacggtcctgcatcaagattggctgaatggcaaggaatataagtgcaaagtttccaataaggcacttcctgcgcctatcgagaaaacgatcagcaaggcgaagggtcagccgcgcgagccgcaggtttacacactcccaccgagccgcgaggagatgacgaaaaatcaggttagccttacctgtttggtcaaaggtttctatccttccgacattgccgttgaatgggagtccaacggccagccagaaaacaattacaagaccaccccaccggtcctggatagcgacggttccttcttcctgtacagcaaactgacggtggataagagccgttggcaacagggaaatgtcttctcttgcagtgtcatgcatgaagccttgcacaatcattacacccagaaaagcctgtccctctctcccggtaaa

SEQ ID NO: 15898 - DNA, 1422 bp, synthetic construct
  misc_feature 1..1422: note = source = /note="Description of Artificial Sequence: Synthetic coding sequence"
  source 1..1422: mol_type = other DNA
atggctgtcatggctccccgtactctggtgctgctgctgtcaggggcactagctctgacccagacctgggctcaggtgactctgagggaaagcggccccgctctcgtcaaacctacccagacactgaccctcacttgtaccttcagcggcttttcattatcaacctccgggatgagcgtcggctggataaggcagccccctggcaaagctctggagtggctagccgatatttggtgggacgataagaaagactataatcctagcctcaaatcaagactgacaatcagtaaagatacctctaaaaatcaggtcgtgctcaaggtgacaaatatggacccagctgacactgccacatattactgtgcccgatccatgatcacaaactggtacttcgacgtgtggggggccggtaccactgtgaccgtcagcagcgcttctactaaggggccaagcgtcttcccactagccccaagttccaagtccacatctggggggactgctgctctgggctgcctggtcaaggactattttcccgagccagtgactgtgtcttggaactcaggcgcactgacttctggagttcatacattccctgcagttctgcagtcctctggcctgtattcactgagctccgtcgtgacagtgccctcctcttcactgggcacccagacctatatatgtaacgtgaaccacaaaccaagtaacaccaaagtggacaagagggtggaacccaaatcttgcgataaaactcatacttgtcccccttgtcctgctccagagctgctaggaggacctagtgtctttctcttccccccaaaacccaaagacacactgatgatatcccggacccctgaggttacatgcgtcgttgttgatgttagccatgaagaccccgaagtgaaatttaattggtacgtggacggcgtggaagtgcacaacgctaagacaaagcccagggaagaacagtataattcaacataccgggttgtatcagtacttaccgtgctgcaccaggattggcttaacggtaaagaatacaaatgtaaagtgtctaacaaggccctgcccgcccctatagaaaagacaatctcaaaggccaagggccagccaagagagcctcaagtttacactctgccaccatctcgagaagaaatgacaaagaatcaggtatctctgacctgcctggtgaagggcttctacccaagcgacatcgccgtggagtgggaatctaatggccaaccagaaaacaattacaaaaccaccccccccgtgctggactccgacggcagctttttcctgtatagcaagttgaccgtggataagtcccggtggcagcagggcaatgtgttctcttgcagtgtgatgcatgaggctctccacaaccattacacacagaaatctttgagcctgtccccagggaag

SEQ ID NO: 15899 - DNA, 1422 bp, synthetic construct
  misc_feature 1..1422: note = source = /note="Description of Artificial Sequence: Synthetic coding sequence"
  source 1..1422: mol_type = other DNA
atggccgtgatggctcctcgaacgctcgtgttgctgctaagtggtgccttagcactaacccaaacctgggctcaggtgacgctccgcgaatcagggccagctctggtaaaaccaactcaaactttgacactaacatgtacattctccggcttcagccttagcacctccgggatgtccgtgggctggattaggcagccgcctggaaaagccctcgagtggctggctgatatctggtgggatgacaaaaaagactataatcccagtctgaagagtcgtctcaccatcagcaaagacacctccaagaatcaggtggtgctcaaagttacaaatatggacccggctgatactgccacctattactgcgcccgttctatgatcacaaactggtattttgacgtgtggggggccggcaccaccgtgaccgtgagttccgcctccactaaggggccttctgtttttccgctggcacccagctctaaatcaacaagtggggggacggccgcactgggatgtctggtaaaagattactttccggaacccgtaacagtgtcgtggaactcgggcgcccttactagcggcgtgcatacgttccccgcagttttgcaatcctctgggctgtattctctcagctccgtcgttacggtgccatcttcgagtctcggaacgcaaacgtacatctgtaacgtgaaccataaacctagcaataccaaggttgataaaagagtcgaaccaaagtcatgcgacaagacccatacctgccccccctgccccgccccagagctgttgggggggccatccgtgtttttgttccccccgaagccgaaagacactctcatgatctcaaggaccccggaggtgacctgcgttgttgtggacgtttcccatgaagatccagaagttaagttcaactggtatgttgacggggtggaggtgcacaatgctaaaaccaagcctcgggaggaacagtataatagcacctaccgcgtcgtgtcggttctgacggtgctgcaccaggactggcttaacgggaaagaatataaatgtaaagtaagcaataaagccctgccagctcctatagaaaagactatcagcaaagctaaaggacagccgagggagccacaggtctacaccttgccgcctagcagggaggaaatgaccaaaaaccaggtgagcctgacttgcctcgtaaaggggttctacccatccgatattgcagtggaatgggaatccaacgggcagcctgagaataactacaaaacaactcccccggttttagactctgatgggagcttctttctgtattccaaactgacagttgacaagtccagatggcagcagggaaacgtcttctcttgctcagtcatgcacgaagctttgcacaaccactacacacagaaatcactgagcttgtcccccggaaag

SEQ ID NO: 15900 - DNA, 1422 bp, synthetic construct
  misc_feature 1..1422: note = source = /note="Description of Artificial Sequence: Synthetic coding sequence"
  source 1..1422: mol_type = other DNA
atggcggtgatggcgcctaggaccctcgtattattgctcagcggagctttggccctcacccagacatgggcgcaggtcacgctgagagagagcggcccggctctggtcaaacccacccagacgctgactctgacttgtacgttctctgggtttagcttaagcacatccggcatgagcgtgggatggattcggcagcctcccggaaaagccctcgaatggttggccgacatttggtgggacgataagaaggactataacccatcattgaagagccgtcttaccatatccaaagatacaagtaagaatcaggtggtcctaaaagtcactaatatggatccggcagatacggccacttattattgtgccaggagcatgattaccaattggtacttcgatgtttggggtgccgggactacagtcactgtgtcaagcgccagcactaagggtccctctgtttttcctttagccccatcaagcaaatccactagcggtggcaccgcggctttagggtgcctcgtcaaagactactttccagaaccagtcacggtgagctggaactccggtgccttaacatccggtgtacacactttcccagccgttttgcagtcctccgggctctattctctgtccagcgtcgtgactgtcccctcaagtagcctcggtactcagacttacatctgcaacgtcaatcacaagcctagcaacaccaaggtggacaagcgcgtggagcctaagtcgtgtgataaaacacacacgtgcccaccctgccccgcgcctgaacttctcggtggcccctccgtgtttctctttccacctaaacccaaggacacccttatgattagtcggacgcccgaagttacatgcgtggtggttgatgtgagccatgaagatcctgaagtgaaattcaactggtacgtggacggagtggaagtacataacgccaaaacaaagcctcgggaagaacagtacaattctacataccgtgtcgtcagtgtgctgacagtgttgcaccaggactggctgaatggcaaagagtacaaatgtaaggtgagcaataaggcccttccagctccaatcgaaaagacaatcagtaaggccaaaggccagcctcgagagcctcaggtttatacccttcccccttcccgcgaggaaatgacgaagaaccaggtgtcactcacctgcctggttaaggggttctatccaagcgacatagcagtcgagtgggagtccaatggccagcctgagaacaactacaagaccaccccgccagtattagatagcgatggtagcttcttcctgtattccaagcttactgtggataaatcccgctggcagcagggtaatgttttttcatgttccgtaatgcacgaggctctgcataaccattatacacagaagagtctgagcctgtcccccggtaaa

SEQ ID NO: 15901 - DNA, 1422 bp, synthetic construct
  misc_feature 1..1422: note = source = /note="Description of Artificial Sequence: Synthetic coding sequence"
  source 1..1422: mol_type = other DNA
atggcagtgatggcccctcggaccctggttctgctgctctccggtgccctcgccctcacccagacctgggctcaggttacactgagagagtcagggcccgccttggtcaaaccgactcagacgcttacgcttacctgtactttcagcggtttcagcttgtctacgagtggcatgagcgtgggatggattcgacagccgcctggcaaggctctggagtggctagccgatatatggtgggacgacaagaaggattacaatccttcgttgaaaagtagactcaccattagcaaagacacttccaaaaatcaagtggttcttaaagtgaccaatatggacccggccgatacagctacgtactattgtgcccggtccatgatcactaattggtactttgacgtttggggcgccgggactacagttaccgtgtcctctgcttcaacgaaagggccgtcagtgtttccattggctcccagcagtaagtcaacctctggcggaacggctgctctgggctgtctggttaaggattactttcctgagcccgttacggtcagctggaattcaggcgccttgacttccggggtccatactttccccgctgttctccagagtagcgggttgtactctctaagctccgtggtgaccgtacccagctcctccctaggtacccaaacatatatctgcaacgttaaccacaaaccctccaatacaaaggtagataaaagagtcgagcccaagagctgtgacaagacccacacatgccccccttgtcccgcaccagagctgctcggtggtccctcagtgttcctcttcccgcccaagcccaaggacaccctgatgatctctcgaaccccagaagtcacatgtgtggtggtggatgtctctcacgaggaccctgaagttaaattcaactggtacgtggacggtgtggaggtccataacgcgaagaccaagccgcgcgaagaacagtacaattcaacctaccgggtggtgtctgtcctcacagtcttacatcaagactggctgaacggcaaagaatacaaatgcaaggtgtccaataaggccctgcccgctccaatcgaaaagaccatcagcaaggcaaagggacagcctcgggaaccccaggtctataccctccctccttcacgtgaggagatgaccaagaaccaggtcagtctgacctgcctggtcaagggattctacccgagcgatatcgcggtcgagtgggaatccaatggtcagccagagaacaactataagaccacgccgcctgtgctagactccgacgggtcattctttctgtattccaagttgacagtcgataagagccggtggcagcagggaaatgtgttcagctgctctgtgatgcatgaggccctgcacaaccattacacacaaaaatccctctccttgtctccgggtaag

SEQ ID NO: 15902 - DNA, 1422 bp, synthetic construct
  misc_feature 1..1422: note = source = /note="Description of Artificial Sequence: Synthetic coding sequence"
  source 1..1422: mol_type = other DNA
atggccgtgatggccccccggaccttggtgctgttactatccggtgccctagccttgacccaaacctgggctcaggtcaccttaagagagagcggacctgccttagtgaagcctacccagaccctcactctgacttgcacattcagcggcttcagtctgtccacttcaggaatgtcagttggctggatccggcagccacctgggaaagccttggaatggctcgctgatatttggtgggatgataagaaagactacaacccctctcttaagagccgtctgaccattagcaaagacacttccaaaaaccaggtcgttcttaaggtgaccaatatggaccctgcagacaccgcaacatattactgtgcccggtctatgataacaaactggtattttgatgtgtggggagccgggaccactgtgacagtgtcctcggcaagcacaaagggcccttcggtcttccctcttgccccaagctcgaaatccacctcaggtggaacagctgcgctgggatgcttggtcaaagactattttccagagccagttacggtgtcctggaactctggtgccttgacctctggcgtgcatacattccctgcagtactgcaatcatctggtctgtacagcctgtcttccgtcgtgaccgtacccagcagctcactagggacacagacctacatttgtaatgtaaaccataaaccttctaataccaaggtggataagagggtcgaaccaaaaagttgtgataagacacacacatgtcccccttgcccagcaccagaactgttgggtgggccttctgtttttctgttcccgcccaagccaaaagataccctgatgattagcagaacacccgaggtgacttgcgttgtggtggacgtgtcccatgaggaccctgaggtgaagtttaattggtacgtcgacggagtggaggtacataatgcgaagaccaagcccagggaggaacagtacaactctacctaccgagtggtcagtgttctgacagtgctgcatcaggactggttaaatggaaaagagtacaagtgcaaggtgtcaaataaggctctgccggccccgatcgaaaaaaccatctctaaggccaaaggtcagcctagggagccccaggtgtatacactcccgccctctcgagaagagatgaccaaaaatcaggtgtcgttgacttgtctggtcaagggattctatccgagcgacattgccgtcgagtgggaatcgaatggccagcccgaaaacaattacaaaactaccccccctgtcttggattcagatggatctttctttttatactcgaaacttaccgttgacaaatcacgatggcagcagggcaatgttttctcatgctccgtaatgcacgaagcacttcacaatcattacacacagaaatccctcagtctctctcctggaaaa

SEQ ID NO: 15903 - DNA, 1422 bp, synthetic construct
  misc_feature 1..1422: note = source = /note="Description of Artificial Sequence: Synthetic coding sequence"
  source 1..1422: mol_type = other DNA
atggctgtcatggcaccgcggaccctggtccttctgctgtccggagcactggcacttactcaaacttgggcacaggtcacccttcgggaatccggaccagcactggtcaaaccaactcagaccctgaccctcacctgcacctttagcggtttctccctgtcgacctcgggaatgtccgtcggatggatacgccagccaccaggtaaggcactggagtggctggctgatatttggtgggacgataagaaagattacaacccatccctgaagtcaaggcttactatttcaaaggatacttccaaaaaccaggtggtgcttaaggtgactaatatggatcctgcagatactgcaacctattactgtgcaaggtcgatgatcactaattggtacttcgatgtctggggagcaggtaccaccgtgactgtgtcatccgcctctacgaaaggtccctccgtgtttccacttgcaccttcaagcaagtccacttcgggaggaacggcggcccttggttgcctcgtgaaggattacttccctgaacctgtgactgtgagctggaactcaggcgcccttacttcgggagtccatacttttccagctgtgctccagagctcgggactttactcacttagcagcgtggtgacggtcccttcaagctcactcggtactcagacttacatttgcaatgtgaaccacaagccttcaaacaccaaagttgacaaaagagttgagcccaagtcgtgcgataagacgcatacctgcccaccttgtcctgcacctgaacttctggggggacccagtgttttcttgtttcccccaaagcctaaagataccctcatgatctcaaggactccggaggtgacttgtgtcgtggtggatgtttcacatgaagatcctgaagtgaagtttaactggtacgtggacggagtcgaggtgcataacgcaaagactaaaccaagagaagaacaatacaattccacctaccgagtcgtcagcgttctgacggtgctgcaccaagactggttgaatggaaaagaatacaaatgcaaggtgagcaacaaagcattgcccgcgcctatcgaaaagactatctcgaaggcgaaaggtcagccgagagagcctcaggtgtacactcttccacctagcagggaagaaatgactaagaaccaagtgtcgcttacctgtctggtgaaaggattctacccatccgatattgccgtggaatgggaatcaaatggacagccagagaataactacaagactactccacctgtcctggattcggatggctcctttttcctgtactcaaagttgacggtggataagtcccgctggcagcagggaaatgtgttttcgtgtagcgtcatgcacgaggccctccataaccattacacccagaagagcctttccctgtcgcctggcaaa

SEQ ID NO: 15904 - DNA, 1422 bp, synthetic construct
  misc_feature 1..1422: note = source = /note="Description of Artificial Sequence: Synthetic coding sequence"
  source 1..1422: mol_type = other DNA
atggcggtgatggcacctagaaccctcgttctcctccttagcggggccctggcacttacccaaacttgggctcaggtgactctgagagaatccgggccggcccttgtgaagccaacccagaccctgaccctgacctgtactttttccgggttctccctctccacctcggggatgtcggtgggatggattaggcaacctcctggcaaggcacttgaatggcttgcagacatctggtgggatgacaagaaggattacaacccttcgcttaaatctcgcttgaccatcagcaaggatacttctaagaatcaggtcgtgctgaaagtcacgaatatggatcccgcagataccgcaacttactattgtgcaaggtccatgatcaccaattggtactttgacgtgtggggagcaggtactacggtgaccgtctcttcagcttcaacgaaagggcctagcgtgttccctcttgcaccatcaagcaagtcaacctccggaggaactgccgcactgggttgtctcgtgaaggactactttccggaaccagtgacggtgtcctggaactccggtgcactgacctcgggagtccatacctttcctgccgtgctgcagtcctcgggattgtacagcctgtcgtccgtggtcaccgtgccatcctcttcccttgggacccagacctacatttgcaacgtgaatcataaaccgtccaacaccaaggtcgataagcgcgttgagccgaagtcctgtgataagactcatacctgcccgccctgtcctgcccccgaattgcttggaggaccttcagtgtttctgtttccaccaaaacctaaggataccctcatgatttcgcgtaccccggaagtgacctgcgtggtcgtcgatgtgtcacacgaagatcctgaggtgaagtttaactggtacgtggatggagtcgaagtgcataacgccaagactaagccccgggaagaacagtacaactccacttaccgggtggtcagcgtcctgactgtgctgcatcaagattggcttaacggtaaggaatacaagtgtaaagtttcgaacaaggccctgcctgctcctattgagaaaactatttctaaggcaaagggacagccaagggaacctcaagtgtacacccttcccccatcccgggaggagatgactaaaaaccaggtatccctgacgtgcctggtcaagggtttctacccctcggatattgcagtcgagtgggagtccaatggacaacctgaaaacaactataagaccacccctccagtgcttgattccgacggttcgttcttcctttacagcaagctgactgtcgataagtcccgctggcaacaaggaaacgtgttctcctgtagcgtcatgcacgaagcgctccataaccactacacccaaaagtcgctgtccctctcccccggaaag

SEQ ID NO: 15905 - DNA, 1422 bp, synthetic construct
  misc_feature 1..1422: note = source = /note="Description of Artificial Sequence: Synthetic coding sequence"
  source 1..1422: mol_type = other DNA
atggctgtgatggccccccgaactctagtactgttgctgagcggcgctctggccttaacccagacctgggcgcaggtgacactgcgcgagtcaggtcccgccttggttaaacctactcaaactctcactcttacatgcaccttttccggattctcactgagcactagtgggatgagcgttggttggattcgacagcctcccggcaaggccctggaatggctagcggatatctggtgggatgataaaaaagattacaaccccagtctgaaaagcagactgacaatcagcaaagacaccagtaagaatcaggtcgtgctgaaagtgaccaatatggaccccgccgacactgcgacctactactgtgctcgctcaatgatcacgaattggtatttcgatgtgtggggcgccggcacgacagtcactgtcagctcggcctcgaccaaggggccgtcagtgttccctttggcaccctcttctaagagcacttccggaggcacagctgcactgggctgtttagtgaaggactacttccctgagcctgtcaccgtctcctggaattctggggccctcaccagcggcgttcacacttttcctgcagtccttcagtcgtcaggtttatactcgctgtcttctgtggtcacagtgccctcttcctcactgggaacacaaacttatatctgcaatgtgaaccataaacccagcaacaccaaggtggacaagagagtggagcccaagagttgtgacaaaactcacacatgtcctccctgccctgctccagagctactcggcggcccatctgtattcctattccctccaaaacctaaagataccctgatgatttctagaactccagaagtgacctgcgtggtggtggatgtctcccacgaggatccagaggttaagtttaattggtatgtcgacggggtggaagtgcacaatgccaaaacaaagccccgggaggaacagtataattctacctatagggtagtatctgttcttacagtgctgcatcaagattggcttaatgggaaggagtacaaatgcaaagttagcaacaaagctctgcctgcacccattgagaaaactatctcaaaggccaagggacagcctagagaaccccaggtctatactctgccgccatcccgggaggagatgacaaaaaaccaggtgtctttgacatgcctggtgaagggtttctatccgagcgacattgctgttgagtgggagtcaaatggccaacccgagaacaactataaaaccaccccccccgtgcttgactccgatggctccttctttctgtattctaaactcacagttgataagtcgaggtggcagcagggcaacgtattcagttgcagcgttatgcacgaagcgctacacaaccactatacacagaaatccctatctctaagtccagggaaa

SEQ ID NO: 15906 - DNA, 1422 bp, synthetic construct
  misc_feature 1..1422: note = source = /note="Description of Artificial Sequence: Synthetic coding sequence"
  source 1..1422: mol_type = other DNA
atggcagtcatggccccgcgcaccctcgtgctgctgctctcaggagcacttgccctgacccagacttgggcacaggtgaccctcagggagtcaggaccggcgctggtcaaaccgactcagacgcttaccctgacttgtactttctccggcttctctctgtctacttcgggaatgtcagtcggatggattcggcaacctccgggcaaggcgctcgagtggttggctgatatctggtgggatgacaagaaagactacaacccgtccctgaaatccagactgactatctcaaaagacacctcgaagaatcaggtcgtgttgaaggtgactaacatggatccggctgacaccgccacctactactgcgcgaggtcgatgatcaccaactggtacttcgacgtgtggggtgccggaactactgtgactgtgtcatcggcaagcactaagggaccgtcggtgtttccgctggcgccaagctcgaaaagcacctccggcggaactgcggccctgggatgcctggttaaggattacttcccggagccggtcaccgtcagctggaactcgggagccctcacctccggggtgcatacctttccggcggtcctccagtcaagcggcctctactcgctctcctcggtggtgaccgttccgtccagctcgctcggtacccagacctacatctgcaacgtcaatcacaagccatcgaacactaaagttgacaagagagtggaacctaagtcctgcgacaaaacccatacttgtccgccgtgccctgccccggagctcctgggaggacctagcgtatttcttttcccgccaaaacccaaagatactctgatgatttcacgcactcctgaggtgacctgcgtggtcgttgacgtgagccatgaagacccggaggtcaagttcaattggtatgtggacggagtcgaagttcataatgccaagactaagcctagagaggaacagtataattcaacttacagagtggtgtcggtcctgactgttcttcatcaggactggcttaacggaaaagaatacaagtgtaaagtgagcaataaggcattgcccgccccgatcgagaagaccatcagcaaggcaaagggacagccgcgagagccacaggtctacactctcccgccttcccgcgaggaaatgactaagaatcaggtgtcgctgacttgcctggtgaagggattctatccttcggatatcgctgtggaatgggaaagtaacggccaacctgaaaataactacaagaccaccccaccggttctcgattccgatggctcgttcttcctttacagcaagctgaccgtcgacaagtctcggtggcaacagggaaacgtgttctcctgctccgttatgcacgaagccttgcacaatcattatactcaaaagtccctcagcctgagccccgggaaa

SEQ ID NO: 15907 - DNA, 1422 bp, synthetic construct
  misc_feature 1..1422: note = source = /note="Description of Artificial Sequence: Synthetic coding sequence"
  source 1..1422: mol_type = other DNA
atggcagtaatggcgcctcgcaccctcgtgctccttcttagcggtgcactggctcttactcagacgtgggctcaggtcaccttgagagagtcggggccggcgctagtcaagcccacccagactctgacactcacatgcactttttccgggttttccctctctacatctggcatgtctgtaggctggatacggcagccccctgggaaagcccttgaatggctagccgacatctggtgggatgataaaaaggattataatccgtcactcaagagtcggctgactatcagcaaagacacctctaaaaatcaggtggtgctgaaagtgaccaatatggacccagctgatactgccacatactattgcgctagaagcatgatcacaaactggtatttcgacgtgtggggggctggcaccactgtgacagtgtcgtcagcatcaaccaagggcccaagtgtgtttccattagctccctcaagcaaatccacaagtgggggtacggctgcgctcgggtgcttggtaaaggactacttccccgaaccagttaccgtttcttggaactctggggcactcactagtggggtgcataccttccccgctgtgttgcagtcctccggcctctatagcttgtctagtgtcgtcacggtaccctcatcctccctgggcacccagacctacatttgtaatgtgaaccacaaaccatcaaataccaaggtcgataaacgagtcgagccaaaatcttgcgataagacacatacttgtccgccttgtccagctcctgaactcctgggaggccccagcgtgtttctgttccctccgaaacccaaggataccctcatgatctccaggacgccagaggtcacatgtgtggtggtagacgtcagtcacgaagatccagaggtaaagttcaattggtacgttgatggagtggaagttcataacgctaaaactaagccccgggaagaacagtacaacagtacttacagagtggtctccgtcctgactgttctgcatcaggactggctcaacggtaaggagtataaatgcaaagtgagcaacaaggcactgcccgcgccaatagagaaaacgatctcaaaagccaaaggtcagcccagagaaccacaagtctataccctgcccccctcccgagaggaaatgaccaaaaaccaagtttctcttacgtgtctggtgaagggattctacccctcagacattgctgttgagtgggagtccaacggacagcctgagaacaactacaaaacaacgccgccggttctggactcagacggcagttttttcctctactccaagctgaccgtggataaaagcagatggcagcagggcaatgtgttttcatgttccgtgatgcatgaggctttgcacaaccattacacgcagaaaagtctatccctctcgcctgggaag

SEQ ID NO: 15908 - DNA, 1422 bp, synthetic construct; identical to SEQ ID NO: 15869
  misc_feature 1..1422: note = source = /note="Description of Artificial Sequence: Synthetic coding sequence"
  source 1..1422: mol_type = other DNA

SEQ ID NO: 15909 - DNA, 1422 bp, synthetic construct
  misc_feature 1..1422: note = source = /note="Description of Artificial Sequence: Synthetic coding sequence"
  source 1..1422: mol_type = other DNA
atggcggtcatggccccgcggactcttgtgctgctcttgtctggagcgctggcgttgacccagacctgggcgcaggtgactcttagagaatcggggcctgccctggtgaaaccgacccaaaccctcactctgacttgcaccttctccgggttcagcctgagcacgtcgggtatgtccgtgggatggatacgccagccgccaggtaaagctctggagtggctggctgacatctggtgggatgataagaaggattacaatccttcgctcaaatccaggctgactatctcgaaagacacttcgaaaaaccaggttgtgttgaaggtgacgaacatggatcctgctgacacggccacctactattgtgcgcggtcgatgattaccaactggtactttgatgtgtggggagcggggactacggtcaccgtctcttccgcgtcaaccaagggccctagcgtgttcccacttgctccgagctcaaaaagcacttccggtggaactgccgccctgggttgcctggtcaaggattacttccccgagcctgttaccgtgtcctggaatagcggtgcactgacttctggagtgcacacgtttccggctgtgctgcagtcctccggactttactcgctctccagcgtcgtgactgtcccctcatcctccctgggaacccaaacttacatctgtaacgttaaccataagccgtcaaataccaaagtggacaagcgcgtggagccaaagagctgcgacaaaactcacacctgccctccttgcccagcgccagaactgctgggaggcccatcggtgttcctgtttccgccgaaaccgaaggacaccctgatgatttcgaggactccagaggtgacctgcgtggtcgtggacgtctcacatgaagatccggaagtgaagttcaattggtacgtggacggtgtggaagtgcacaacgccaaaacgaaaccgagagaggagcagtacaactcaacctaccgcgtggtcagcgtgctgactgtgttgcaccaggactggttgaacggtaaggagtacaagtgcaaagtctccaacaaagcactgccagccccgatcgaaaagactattagcaaggctaagggacagccgcgggaaccacaagtgtacaccttgccgccatcacgggaggaaatgaccaagaaccaagtctctctgacttgtctggtgaagggattctacccgtctgatatcgcggtggaatgggaatcaaacggacagccagaaaacaattacaagaccaccccacctgtcctggacagcgacggatccttcttcctgtactcgaagctgaccgtcgacaagtcacgttggcagcaggggaacgtcttttcatgctccgtgatgcatgaagcacttcacaaccactacacccaaaagtccctgtcgctctcaccgggaaag

SEQ ID NO: 15910 - DNA, 1422 bp, synthetic construct
  misc_feature 1..1422: note = source = /note="Description of Artificial Sequence: Synthetic coding sequence"
  source 1..1422: mol_type = other DNA
atggccgtcatggcaccaaggaccttggtgctcctccttagcggtgccctcgcactgacccaaacttgggctcaggtgacccttcgggagtccggcccggctctggtcaagcctactcagaccctcactctcacgtgcaccttcagcggattttcactttcgacctcgggcatgagcgtgggatggattagacagcctcccggaaaagcgctcgagtggcttgcagatatttggtgggatgataagaaagattacaaccccagcctgaagagcaggctgaccatctcgaaggatacttcgaagaaccaggtggtgctcaaggtgactaatatggatccagccgacactgcaacctactactgtgcaagatcgatgatcaccaattggtacttcgacgtgtggggagcgggtactaccgtcactgtgtcgtcggcatcgactaagggaccttcggtgttccctctcgcaccaagcagcaaaagcacctccggcgggaccgcagccttgggttgtctggttaaagattactttcccgaaccagtcaccgtctcgtggaactcaggtgccttgacctccggtgtgcatacttttccagcagtgctccagtcgtcgggactgtactcactttccagcgtggtgaccgtgccttcttcctcgctcggtactcagacgtacatctgtaacgtgaaccacaaaccatccaacacgaaggtggataagagagtcgaaccaaagtcctgtgacaagactcatacctgcccaccatgtcctgccccagaactccttggtggtcctagtgtgtttctgttcccgccaaaacctaaagataccttgatgatatcccgaacccccgaggtgacctgcgtcgtcgtcgacgtctcccatgaggaccccgaagtgaaattcaattggtacgtggatggcgtcgaggtccacaacgcaaaaactaagcctcgagaggaacaatacaactcaacctaccgagtggtgtccgtgcttaccgtgctccaccaggactggctgaacggaaaggaatacaagtgtaaggtgtcaaacaaagcgctgccagcgcccatcgaaaagacgatttcgaaggcaaaaggccagccccgggaaccacaagtttatacgcttccaccatcccgggaggagatgactaagaatcaagtctcgctgacttgcctggtcaaaggattctacccttccgacatcgcagttgaatgggagtcgaatggacaaccagagaataactacaaaacgactcctcctgtcttggattccgatggatcgtttttcctttactccaaactgaccgttgacaagtcccgatggcagcaaggaaatgttttttcatgctccgtgatgcacgaagcacttcacaaccactacactcaaaagtcactgtcgctgtcgccaggaaaa

SEQ ID NO: 15911 - DNA, 1422 bp, synthetic construct
  misc_feature 1..1422: note = source = /note="Description of Artificial Sequence: Synthetic coding sequence"
  source 1..1422: mol_type = other DNA
atggctgtcatggcacccaggacccttgtactgttgttgagcggtgctttggctttgactcaaacctgggcgcaggtgaccctgagggaatccggccctgccctcgtaaagcctactcagactctcaccctgacttgtacattcagcggtttctcactcagcacttccggtatgtccgtgggctggatccgccagcctccgggtaaggcactggagtggctggccgatatttggtgggacgacaagaaagattacaacccgtcactcaaaagtcgcctgaccatctccaaggacacctccaagaatcaagttgtcctcaaggtgacaaacatggatcccgcagacactgctacttactattgcgcccgcagtatgatcaccaattggtacttcgatgtctggggcgctggcaccaccgtcacagtgagcagcgctagtactaaaggaccctcagtgttcccactggcaccctcaagcaagagcacgagcggcggcaccgctgctttgggatgtcttgtgaaagactatttccctgagcctgtaacagtgtcttggaacagtggtgccctgacatcaggtgtgcacacatttccagccgtgctccagtcctctggcctgtattcattgagttctgtggtgactgttccaagcagttctttgggtactcagacatacatctgcaacgttaatcataagcctagtaacacaaaggtcgataaaagggtggagcccaagagctgtgataagacgcatacatgccctccttgccctgcccccgagctgcttggtggtccaagtgtttttctgtttccccccaagccaaaggacacccttatgatcagcaggaccccagaggtcacctgcgtcgtggtcgacgtaagccatgaggatccagaggtgaagttcaactggtacgttgatggtgtcgaggtccacaacgccaaaacaaaaccaagagaggagcagtataacagtacatatagggtggtgtccgtcctcactgtgctgcatcaggactggctgaatggtaaggagtacaaatgtaaggtgtccaacaaggcgcttcctgctcctattgagaaaacaatctctaaggcaaagggccagccccgcgagccccaagtatacacactcccgcccagccgcgaagagatgaccaaaaaccaggtctctttgacatgccttgttaaaggattttacccttccgatatcgccgtcgaatgggagagcaatggccaacccgagaataattacaaaacgacaccccccgttctggatagcgacggttcattcttcctgtacagcaaacttacggttgacaaatcccgctggcaacagggtaacgtgttctcctgttctgttatgcacgaggccctgcacaaccattacacccagaagtccctctccttgtctcctggcaaa

SEQ ID NO: 15912 - DNA, 1422 bp, synthetic construct
  misc_feature 1..1422: note = source = /note="Description of Artificial Sequence: Synthetic coding sequence"
  source 1..1422: mol_type = other DNA
atggccgtgatggcccctaggacactagtcttacttttgagtggggctttagctttgacacagacctgggctcaggtcactctgcgtgaaagcggtccagccctggtcaaacccacccaaaccctgacactcacctgtactttttccggcttcagcctctctactagcggtatgagcgtgggatggataaggcagcctcccggcaaggcgctggaatggttggcagatatttggtgggacgataagaaggactacaacccatccttgaagtcacgccttacaatcagtaaggataccagcaagaaccaggtggtcctgaaagtaacaaatatggaccctgcggacaccgccacgtactattgtgcacgctcgatgattaccaattggtattttgacgtgtggggcgccggcaccactgtgactgtctccagcgcctcaactaaaggcccttccgtgttcccactggcgccctcctcgaaatcgacctctgggggtacagccgcccttggatgcctggttaaggactacttccccgagcctgtcactgtgtcctggaacagtggtgctctgacatccggtgtgcatacgttcccagctgttctgcagagtagtggtctgtacagcttgagctcagtggtcactgttcccagttccagcctgggcacccagacctacatctgtaacgtgaaccacaaaccatcgaacacgaaagtggataagcgcgtcgagcctaagtcgtgcgacaagactcatacatgcccgccctgccctgctcccgaactgctgggcggtccttccgtgttcttatttcccccaaagccaaaggacacactcatgatcagcagaacacccgaggtgacctgtgttgtggttgatgtgtcccacgaagaccctgaagttaagtttaattggtacgtggatggcgtcgaggtccacaatgctaagaccaaaccacgggaggagcagtacaattccacatatcgagtggtgagcgttttgacagtgctgcatcaggactggcttaacggaaaagagtacaaatgcaaggtttccaacaaggccctgcccgccccaattgaaaaaaccatctctaaggcgaaagggcagcctagagaaccccaggtctacactttgccaccaagcagggaggagatgactaaaaaccaggtgagcctgacttgcttggttaagggtttttatccatccgacattgccgtggagtgggagtctaacggccagcctgaaaacaattacaaaacgacaccacccgtcctggattctgacggatccttcttcctctattccaagctgaccgtagacaaatctcggtggcaacagggtaatgtgttctcttgtagtgtgatgcacgaggcgcttcacaatcactacactcagaagtcactctccctatcgcccggcaag

SEQ ID NO: 15913 - DNA, 1422 bp, synthetic construct
  misc_feature 1..1422: note = source = /note="Description of Artificial Sequence: Synthetic coding sequence"
  source 1..1422: mol_type = other DNA
atggcagtgatggctccaagaacactcgtgctcctactcagtggggccctagcactcactcagacatgggcacaggttactctgagagagtcggggcccgccctagtgaaacccactcagacgttaacactgacatgtactttctctggattctcactgagtacatccgggatgtctgtagggtggattcgccagcctcccggaaaagcgctggaatggctagcggatatctggtgggacgataagaaagattacaacccctctttgaaatccagactcactatatctaaagatacttctaaaaatcaggtggttctaaaagtcacaaatatggatccagccgacacagctacttattactgtgcaagatctatgattactaattggtatttcgatgtctggggggccggaactactgtgacagtttcttctgcctctactaaagggccctccgtttttcctctggccccttcctctaaaagtacatcagggggaacagcagctttagggtgtctagtcaaggattactttcccgaacctgtaacagtttcttggaatagtggagcccttacttccggggtacacactttcccggccgtgctccagagttctggactttattctttatcatccgtcgtaacagtaccatcttctagtctaggaactcaaacttatatatgtaacgtgaatcataaaccttctaacacaaaagtagataaacgggtggaacctaaatcttgtgacaaaacacacacgtgcccaccatgtcccgcccctgagctgctgggggggccttctgtatttctgttccctcccaagccaaaggatacactgatgatatcccgcactccagaagtgacatgcgtcgtagtcgatgttagtcatgaggatccagaagtgaaattcaattggtatgtggatggggtggaagtacacaatgccaaaactaagcctcgcgaagaacagtataacagtacataccgcgttgtttcagtgcttacagtcctccatcaggattggctaaacgggaaagagtataaatgcaaggtttctaacaaagccctccctgcccccatagaaaaaacaatttctaaagcaaagggacagccaagagaacctcaggtctatactctccctccatcccgcgaggagatgactaagaaccaggtgtcactgacttgcctggtcaagggattttacccctctgacatagcagtcgaatgggaaagtaacgggcagcctgaaaacaactacaaaacaacgcctcccgtacttgatagtgatgggtctttttttctctattctaagctaactgtagataaatcacggtggcagcaggggaatgtgttcagttgctctgtgatgcatgaggctttgcataaccactatacacagaaaagtctgtccttaagtcccgggaag

SEQ ID NO: 15914 - DNA, 1419 bp, synthetic construct
  misc_feature 1..1419: note = source = /note="Description of Artificial Sequence: Synthetic coding sequence"
  source 1..1419: mol_type = other DNA
atggccgttatggccccgcgcaccttggtccttcttctctccggagcattggcgctgactcagacctgggccgaggtccagctggtggaatccggaggaggacttgtccagcccggcggatccctgcgcctctcgtgtgcagcatcggggttcaatatcaaagacacttacatccactgggtccggcaagccccaggcaaaggcctggagtgggtggcgcgcatctaccctaccaacggatatactcgctacgccgatagcgtgaagggaagattcaccatttctgccgatacctcaaagaataccgcgtatcttcagatgaactcccttcgggctgaggacactgcggtgtactactgcagcaggtggggtggggacggattttacgcgatggactactggggtcaaggcactcttgtcactgtatcatcggcttcgaccaaggggccatccgtattccctctggctccttcatcgaagagtacttccggcggaactgccgctctgggctgtcttgttaaggactacttcccggagcccgtgaccgtaagctggaactcgggtgcgctgacgagcggagtgcacaccttcccagccgtgctccaaagctcgggactgtactcactgtcgtcagtcgttactgtcccgtcatcctcgctgggaactcagacgtacatctgcaatgtcaatcacaagccatccaacaccaaagtggacaagaaggtggagccgaagagctgcgataagactcatacctgtccaccatgccccgcaccggaacttctcggcggtccgagtgtgttcctgttcccgcctaagccgaaggacacgctcatgataagcagaaccccggaagtgacctgcgtggtcgtcgacgtttcacacgaagatcccgaggtgaagttcaattggtacgtcgacggagtggaagtgcataacgctaaaaccaaaccgagagaggagcagtacaactcaacttaccgggtggtttccgtgctgactgtgctccaccaggactggctcaacggaaaagaatacaaatgcaaggtgagcaacaaggccctgccggcgcctattgaaaaaacgatcagcaaagctaagggccaaccccgcgaaccgcaggtgtacactcttccaccctccagggacgaactgaccaagaaccaagtctcgctgacctgcctcgttaagggattctatccatcagacatcgccgtggaatgggaatcgaacggtcaaccagagaacaattacaagacgacccctcctgtgttggattccgatgggtccttttttctgtactccaagctgactgtggataaaagccggtggcagcagggaaacgtcttttcgtgctcggtgatgcatgaagccctgcataatcactacacgcagaagtcgctcagtctgtcccctggc

SEQ ID NO: 15915 - DNA, 1419 bp, synthetic construct
  misc_feature 1..1419: note = source = /note="Description of Artificial Sequence: Synthetic coding sequence"
  source 1..1419: mol_type = other DNA
atggctgtgatggccccgcggactctggtcctcctcctgtcaggcgcattggccctgacccaaacttgggccgaggtgcagttggtggaatcaggaggtggacttgtgcagccgggtggatcgttgcgcttgtcctgtgccgcctcgggcttcaacatcaaggacacctacatccattgggtgcgccaggccccgggaaaaggcctggagtgggtcgcacggatttacccaactaacgggtacaccagatacgccgactcggtgaaaggccggttcaccatcagcgccgacactagcaagaacactgcctacctccaaatgaactcgctgagagcggaggatactgcggtttactactgcagccgctggggaggcgatgggttttacgccatggattactggggacaaggcaccctggtgaccgtttcctcagcgtctaccaagggaccctcggtgttccctcttgccccgtcctccaagagcacttcaggtggtaccgcagctctcggatgcctcgtgaaagattacttcccggaaccagtcactgttagctggaactcaggagcgctgacctcgggcgtgcatactttccccgcggtgctgcagagcagcggactctacagcctgtccagcgtggtcaccgtgccctcctcgtccctgggaactcaaacttacatctgcaacgtgaatcataagccatcgaatactaaagtggataagaaggtcgaaccaaaatcctgcgacaagacccatacctgccctccgtgccccgcccctgaactcttgggaggtccgtcggtgttcttgtttccgcctaagccaaaggacactctgatgatcagccggacgccggaggttacctgcgtggtcgtggacgtatcgcacgaggatcctgaggttaagttcaattggtacgtggacggagtggaggtgcacaacgccaaaactaagccgagagaggagcagtacaactcgacctaccgggtggtgtcggtgctgactgttctccaccaagattggttgaatggcaaggaatacaagtgtaaagtcagcaataaagctctgccggcgccaatcgaaaagaccattagcaaggcgaaaggacagcctagagaacctcaagtgtacactctcccaccgtcgagggacgagctcactaagaaccaggtgagcttgacgtgtctggtgaagggattctacccgtccgacatcgctgtggagtgggagtccaacggccagccggaaaacaactacaagaccactcctccagtgttggactcagacggctccttcttcctctactcaaagttgaccgtcgacaagtcccggtggcaacagggaaacgtgttcagctgctcggtcatgcacgaagcgctgcacaaccactacactcagaagtcgctctcgctttccccagga

SEQ ID NO: 15916 - DNA, 1419 bp, synthetic construct
  misc_feature 1..1419: note = source = /note="Description of Artificial Sequence: Synthetic coding sequence"
  source 1..1419: mol_type = other DNA
atggctgtgatggcccctcggacgcttgtcttgctgctgtccggtgcattagctcttacacagacatgggccgaggtccagctggtcgaatctggtgggggtctggtgcagcctggtgggtcattgcggttgagctgcgctgcgtctggctttaatattaaagatacatacattcattgggtcagacaggcacccggcaaagggctggaatgggtggcccgaatctaccctaccaacggatacactcgctatgctgattctgtaaagggaaggttcacgatttcagctgacacaagcaaaaacaccgcctacctgcagatgaactccttacgcgcagaggataccgcagtctattattgctctcggtggggcggagacggcttctatgcaatggattactggggtcagggtaccctcgttaccgtgtcgtccgcctcgacaaaaggtccgtccgtttttcccctcgccccatctagcaaatccactagtggagggactgctgccttaggatgcctggtgaaagattattttcctgaaccagtaacggtgagctggaactccggagcccttacatccggggtccatacttttcctgccgtgctgcaaagcagtggcctgtatagcttgtcttccgtcgtgacagtgccttcttccagcttagggacacagacttacatatgcaatgtgaaccacaagccctcgaacacaaaagttgacaaaaaggtggagcctaagtcctgcgataagacccacacctgtccgccatgtccagccccagagttactgggaggcccgagcgtgtttttgtttcccccaaagcccaaggatacgctcatgatcagccggactcccgaggtgacgtgcgtggtggttgatgtttctcacgaagatcctgaagtgaagttcaactggtatgttgatggcgttgaagttcataacgctaaaactaagccccgcgaggagcagtataatagtacctacagagtagtttcggtgctgacggttctacaccaagattggctaaatgggaaagagtacaaatgcaaagttagcaacaaggcgctgcctgctcccattgagaagactatctccaaagccaaggggcagccaagagaacctcaagtatacaccctgccaccttcgagagacgaactgaccaagaatcaggtaagcctcacttgtctggtaaagggattttatccgagcgatattgccgtggagtgggagagcaacgggcagcctgagaataactacaagaccactccaccagtgttggacagcgatggaagcttctttctgtatagtaagctgacggtggataagtctcggtggcaacagggaaatgtgttcagctgctcagtcatgcacgaggcgttgcacaatcactatacacagaaatctctgtccttgagcccaggc

SEQ ID NO: 15917 - DNA, 1419 bp, synthetic construct
  misc_feature 1..1419: note = source = /note="Description of Artificial Sequence: Synthetic coding sequence"
  source 1..1419: mol_type = other DNA
atggctgtgatggcaccacggactctcgtccttcttctgagcggtgccctggcacttactcaaacctgggccgaagtgcagcttgtggaaagcggagggggtttggtgcaacctggtggatccctgcgcctgagctgcgcagcatcgggattcaacataaaggatacttacattcactgggtgagacaagctccggggaaaggtcttgaatgggttgcaaggatctatccgactaatgggtacactcggtacgccgactcggtgaagggccggtttaccatttcggcagatacctccaagaacactgcatacctgcaaatgaattcgcttcgggcagaagataccgcagtgtactactgttcgagatggggtggcgacggattttacgctatggattactggggtcaaggcaccctggtgactgtgtcctcagcctcaacgaaaggacctagcgtgttccctctggcgcctagctcgaagtcgacctccggaggcactgcagcactcggttgcctcgtgaaagattacttccctgagcccgtgactgtgtcttggaactcgggagctttgacgagcggagtccataccttccccgcagtccttcagtccagcggactttactcgctcagctcggtggtcaccgtgccaagcagctctctgggtactcagacgtacatctgtaacgtgaaccataagccttctaacactaaggtggataagaaggtggagcctaagtcctgtgataagacccatacctgccctccttgtccggcgccagaactgctcggtggaccatcagtctttctctttccacctaagcctaaagacactctgatgatatcacgaaccccagaggtgacttgcgtggtggtcgacgtctcacacgaagatccagaggtgaaattcaattggtacgtggacggggtggaagtccacaacgcaaaaaccaagccgcgagaagaacagtacaactcgacttaccgtgtggtgagcgtccttaccgtcctccaccaagattggcttaatggaaaggaatacaaatgtaaggtgtcgaacaaggccttgccggcaccgattgaaaagaccattagcaaagccaagggacaacctcgagagccacaggtgtacacgcttccaccttcgcgggatgaacttaccaaaaaccaggtgtcccttacctgtctcgtcaaggggttttacccttcagacatcgcagtcgagtgggaatcgaacggacagccggaaaacaactacaagactaccccacccgtcctggattccgatggatcattcttcctgtacagcaagctcaccgttgacaagtcacgatggcaacagggcaatgtattctcgtgctccgtgatgcatgaggcgcttcacaatcattacactcaaaagagcctgtccctgtcgccagga

SEQ ID NO: 15918 - DNA, 1419 bp, synthetic construct
  misc_feature 1..1419: note = source = /note="Description of Artificial Sequence: Synthetic coding sequence"
  source 1..1419: mol_type = other DNA
atggctgtgatggcaccgcgtacactggtccttttactttctggagcattggctttgacacagacttgggcagaagtccaacttgtggagtcaggtggtggccttgtacaaccgggaggatcattaaggctctcctgtgccgcgtctggttttaacattaaggatacatacattcattgggttaggcaagcacctgggaaagggttagaatgggttgcacgaatttacccaacaaacggttatacgcgatacgcagattctgttaaaggccgcttcacgatatctgctgacacatccaagaacacagcttatcttcaaatgaattctttacgtgcagaggacactgcagtttattattgctcccgctggggtggcgatggattctacgcgatggattattggggacaaggaacactcgtcacggtttcgtcggcctcgaccaaggggccgtcagtttttccactggctcctagtagtaaatctacaagcggaggaacggccgcgctaggttgtctcgttaaagactacttcccagaaccagttacggtttcgtggaatagcggagcacttacatctggcgtccatacttttccggcagttttgcaatcgtcagggttgtactcactttcatcagtagtgacggtaccatcttcgtctttgggaacacaaacatacatttgtaacgtaaaccacaagccgtcaaatactaaagttgataagaaagtggagccgaagtcttgtgataagacacacacgtgcccaccatgccccgctccagagctgctcggaggaccatctgtatttctttttccaccgaaaccaaaagatacacttatgattagtagaactccggaggtgacgtgcgtggtcgtagatgtctcacatgaagatccagaagttaaatttaattggtatgtggatggcgttgaggtgcataacgcaaaaaccaaacctagagaggaacagtacaactcaacctaccgtgtggttagtgtcttgaccgtcctccaccaagattggctcaatggtaaggaatataaatgcaaggtttccaataaagctcttcctgcgccaatagaaaaaacaatatcaaaggctaaaggccaaccgcgagaaccgcaagtctacaccttgcctccatccagagacgagctgacaaagaatcaagtgtcactcacttgccttgttaaaggattttacccttccgatatcgccgttgaatgggaatctaacggacaaccagaaaataattataagacaactccaccagtgctggacagtgacggaagtttttttctttactctaagttgaccgttgataaatcgaggtggcaacaaggaaatgtgttttcatgtagtgtgatgcacgaggcactccataatcattacacgcagaaatctttgtcgctgagccctgga

SEQ ID NO: 15919 - DNA, 1419 bp, synthetic construct
  misc_feature 1..1419: note = source = /note="Description of Artificial Sequence: Synthetic coding sequence"
  source 1..1419: mol_type = other DNA
atggcagtcatggccccgcggacccttgtcctgctgctgtcaggagcgctggctctgacgcagacttgggcagaggtgcagctggtcgaatccggcggaggtcttgtgcaaccaggagggtcgttgcgcctgtcctgcgcggccagcggattcaacattaaggacacttacatccactgggtgcgacaagctccgggaaaggggttggaatgggtggcgcggatctacccgaccaacggatacactaggtatgccgattcagtgaaaggacgctttaccatctcggctgacacctccaaaaacaccgcctacctccagatgaattccctccgcgctgaggatactgcagtctattactgttctaggtggggaggcgatggattctacgcaatggattactggggacagggcacgctcgtgaccgtttcctcggcgtccactaagggaccaagcgtgtttcctcttgccccgtccagtaagagcacctcaggagggaccgcagccctgggctgccttgtgaaggactactttccggagccggtgaccgtcagctggaactcaggagccctcacttcaggtgtccacaccttcccggccgtcctgcaatcctcgggcctgtactccctgtcgagcgtggtcacggtgccgtcctctagcctgggcacccaaacttacatctgcaacgtgaatcacaagccctccaacactaaggtggacaagaaggtggaacctaagagctgcgataaaacccatacctgtcccccttgccccgctccagaactgctgggtggcccctcagtattcctgttccctccaaagccaaaggacaccctgatgatctcgagaactcccgaagtgacttgcgtcgtcgtggacgtgtcccacgaagatccggaagtgaagttcaattggtacgtggatggggtcgaagtgcacaacgccaagactaagccaagagaggagcagtacaattcaacctaccgcgtcgtgtcagtcctcactgtcctccatcaggactggctcaatgggaaggagtacaaatgtaaggtgtcgaacaaagcattgccggcccctatcgagaaaactatctccaaagcgaagggtcagccgcgggaaccgcaggtgtacactctgccaccgtcacgggacgagctcacgaaaaatcaggtttcgctcacctgcctcgtgaagggattctacccatcggatattgccgtggaatgggagagcaatggtcagccagaaaacaactacaaaacgacccctcctgtgctggacagcgacggatcgtttttcctgtacagcaaactgactgtggacaagtcgagatggcagcaaggcaacgtgttctcgtgcagcgttatgcatgaagcgttgcataaccactacacccaaaagtccctctcgttgtcgccggga

SEQ ID NO: 15920 - DNA, 1419 bp, synthetic construct
  misc_feature 1..1419: note = source = /note="Description of Artificial Sequence: Synthetic coding sequence"
  source 1..1419: mol_type = other DNA
atggccgttatggcgcctcggactttggtgttgctgcttagcggagccctcgccctgactcagacctgggccgaagtgcaactcgtggaatcgggaggtggactcgtgcaaccgggcggatccctgcggctgtcttgcgccgcatcgggattcaacatcaaagatacttacatccattgggtgcggcaggcaccgggcaagggactggaatgggtcgctcggatttacccgaccaatggttacactcgctacgccgactccgtcaagggacgctttaccatcagcgcggacaccagcaagaacactgcttacctccagatgaactcgcttcgggcggaggataccgcagtctactattgttcccgctggggcggagatggattctacgcgatggattactggggccagggcacgctggtcaccgtctcaagcgcgagcactaagggaccatcagtctttcccctggccccttcttcgaagtcgacgtcgggaggcactgcggcgctgggatgcctggtcaaagattacttcccggaaccagtaaccgtgagctggaactcaggcgcactgacgtcaggtgtgcataccttccctgcggtgctgcagtcgagcgggctgtactccctgtcgagcgtggtcactgtgccttcatcaagcctgggaacgcagacctacatctgcaacgtgaaccacaaaccgagcaatacgaaagtggacaaaaaggtggagcctaagtcctgcgacaagacgcatacctgcccgccgtgcccggcgcctgagttgctgggtggaccttccgtgttcctgttcccaccaaagcctaaggataccttgatgatctcccggaccccggaggttacctgcgtggtggtggacgtctcacacgaagatccggaggtcaagttcaactggtacgtggacggagtggaggtgcacaatgcaaagaccaagccacgggaagaacagtacaacagcacttacagagttgtgtcagtgctgaccgtgctccaccaggattggctgaacgggaaggagtacaagtgcaaggtgtcgaacaaggccttgcccgcaccaatcgaaaagactatctccaaagccaaggggcagccgcgcgagccgcaagtgtacaccctgccgccgtcaagggatgaactcacgaagaaccaagtctcgctcacctgcctcgtgaaaggattctacccgagcgacatcgcagtggagtgggagtcaaatggccaaccggaaaacaattacaaaactacgccgccagtcctggactctgatggcagcttctttctctactctaagctgactgtcgacaaatcgcgatggcaacagggcaacgtgttctcatgctccgtcatgcatgaggccctgcacaaccattacacccaaaaaagcctttcgctctcacccgga

SEQ ID NO: 15921 - DNA, 1419 bp, synthetic construct
  misc_feature 1..1419: note = source = /note="Description of Artificial Sequence: Synthetic coding sequence"
  source 1..1419: mol_type = other DNA
atggcagtgatggcacctcgtacgcttgtcctgctcctttcgggagcactggccctcacccagacttgggcagaggtgcaactggtggagtccggtggcggacttgtccaaccggggggctcgctccgcctttcctgtgcagcctcgggattcaacattaaggacacttacattcattgggttcgtcaagccccagggaagggactcgagtgggtcgcgaggatctaccccacgaacggttatacccggtacgcggattccgtgaaaggcagatttaccatctctgccgacaccagtaaaaacaccgcgtacctgcaaatgaactcccttagagccgaggacaccgctgtgtactactgctcaaggtggggtggggatggtttctacgcaatggattactggggccaaggtactctcgtcaccgtgagctccgcatcgactaagggcccctcggtgtttcctctggctccatcgtcaaagtcgacctcaggaggtacggcagcacttggatgtctcgttaaggattactttccggaacctgtgaccgtgtcatggaacagcggagccctgactagcggagtacacacctttcctgccgtcctccaatcaagcggactttactcgctctcgtcggtggtgaccgtgccctctagcagccttggaactcagacgtacatctgtaacgtcaaccataaaccgtcgaacactaaagtcgataagaaggtcgaaccaaaatcatgtgacaaaactcatacttgtccaccatgtcctgccccagagctgcttggcgggccctccgtgtttctgttcccaccaaaaccaaaggatactctgatgatttcacgaacgccagaagttacttgcgtggtcgtggatgtgtcccacgaggaccctgaggtgaagttcaattggtacgtcgacggagtggaagtgcataacgcaaagactaagcctagagaggagcaatacaactctacttaccgagtcgtctcagtcctgaccgtgttgcatcaggactggcttaacggcaaagaatacaagtgtaaggtgtccaataaggcattgccagccccgattgaaaagaccatttccaaggccaagggccaacctagagaaccccaagtctacaccctgcctccttcaagagacgaactgaccaagaaccaggtgtccctcacgtgccttgtgaagggtttctatccatcagatattgctgtggaatgggaatctaacggacaacctgagaacaactacaaaaccacccctcctgtgctggattccgacggatcgttttttctctactccaaactgactgtggataagtcgcgctggcagcaggggaatgtgtttagctgcagcgtgatgcatgaggcactgcataaccattacactcagaagtccctctccctttctcccggt

SEQ ID NO: 15922 - DNA, 1419 bp, synthetic construct
  misc_feature 1..1419: note = source = /note="Description of Artificial Sequence: Synthetic coding sequence"
  source 1..1419: mol_type = other DNA
atggctgtgatggcacctagaaccttggttttgctgctcagcggggccctcgccctgacccaaacctgggccgaagtgcagctggtggaatccgggggtggcctggtccaaccgggtgggagtctccgactaagttgcgccgcttccggtttcaatattaaagacacctacattcactgggtgcgacaggctcccggcaaaggactggaatgggttgcgcgtatttaccctaccaacgggtacacgcgatacgcggacagcgtcaaaggccgattcacaatatccgctgatacatccaagaataccgcctatcttcagatgaactcgctcagggccgaagacacagccgtttattactgctcacgatgggggggggacgggttttacgccatggactattggggccaaggcaccctggtcacggtttctagtgcgagcactaaaggacccagtgtattcccactggctccatcctctaagagtacttcaggtgggacagcagctcttggctgcctggtcaaggactactttccagaaccggtcacagtcagttggaatagcggggctctgacatctggagtgcacacctttcctgcggtgctgcagagttccggattgtattccctgtcctcagtggtgactgtacccagttcctcccttggcacccagacttatatctgtaatgtgaaccataagccaagcaatactaaggtggataaaaaagtcgagcctaagagctgcgataaaacacatacctgccccccctgccccgcacctgaactgttgggcggccccagtgtgttcctcttcccacctaagcctaaggacacattgatgatctcccgaacacccgaagtgacttgcgtcgtggtggacgtgtctcatgaagacccggaagtgaaattcaactggtacgtcgacggagtggaagtccataatgccaaaaccaaacccagagaggagcagtataacagtacctaccgcgttgtgagcgtcctgactgtactgcaccaagactggttgaatggaaaagagtataagtgtaaggtctctaataaggctctgccggcgcctatcgaaaaaacaattagtaaggctaaaggtcagcctagggagcctcaagtgtacactctgcctcctagcagggacgaacttacaaagaaccaggtttcgctaacttgtctcgtgaagggattttatccctctgacatcgccgtggagtgggagtccaacgggcaacccgagaacaactataagactacacccccggtgctagactccgacggaagcttctttctttactccaaactaaccgttgataaaagcagatggcaacaagggaatgtgtttagctgtagcgtgatgcacgaagccctgcacaatcattacacacaaaagtcgctgtctctgagcccaggg

SEQ ID NO: 15923 - DNA, 1419 bp, synthetic construct
  misc_feature 1..1419: note = source = /note="Description of Artificial Sequence: Synthetic coding sequence"
  source 1..1419: mol_type = other DNA
atggccgtgatggcaccacgcacactggtgttgttgctgagcggcgcgctagccctcacacagacctgggcagaagtgcagctcgtggaaagcggcggaggattggtgcagcccgggggctcactgaggctttcatgtgccgctagtggattcaacatcaaagatacctacatccactgggtacgccaggcaccaggcaaaggactggaatgggtcgctcgtatttaccccaccaacgggtatacccggtacgccgattcagttaagggccggttcaccataagcgccgataccagcaagaacacagcctacctgcagatgaacagcctccgggcggaggataccgccgtttactattgctctcgatggggaggtgatggcttctacgctatggattactgggggcagggtactcttgtaacggtctcctcagctagtaccaaaggcccaagcgtcttcccactggccccctcttcaaagtctactagcgggggaactgccgccttgggctgtctcgtgaaagattactttcctgagcccgtcaccgttagctggaatagcggagcccttacaagtggagtgcataccttcccggctgtactacagagttccggattgtattccctgtcttccgtggtaaccgtgccttccagctctcttggtacacaaacctatatatgcaatgtcaaccacaagccttctaatactaaggtggataagaaggtagaacccaagtcttgcgataaaacccatacgtgccctccttgcccggccccagagctgttgggaggtccttcagtcttcctcttccctcctaaacctaaggataccttaatgatttcacgcaccccggaagtgacatgtgtggttgtcgatgtgagtcatgaggatccagaagtaaagttcaactggtatgtcgacggggttgaggttcacaacgcaaagacaaaaccccgcgaagaacagtacaactcgacttacagggtggtgagcgtgcttaccgtgctgcaccaggattggttaaatggtaaagagtacaaatgcaaggtgtctaacaaagcacttcccgctccgatcgagaaaaccattagtaaggccaaggggcagccacgagagccccaggtttatacattaccgccaagtcgcgacgagttaaccaagaaccaagtcagtctgacctgcctagtaaaagggttctacccatctgacatagccgtggagtgggagtccaatggccagcccgaaaataattataagactacccctccagttctggactctgacggcagcttctttctgtacagcaaactcaccgtcgacaaaagccgctggcaacaaggaaatgtgttttcctgctccgtgatgcatgaggctcttcacaatcactatacacagaagagtctgagccttagccctggc

SEQ ID NO: 15924 - DNA, 1419 bp, synthetic construct
  misc_feature 1..1419: note = source = /note="Description of Artificial Sequence: Synthetic coding sequence"
  source 1..1419: mol_type = other DNA
atggcagtgatggctccgaggaccctggttctgctcctgtccggggcacttgccctcacacagacttgggcagaggtccagctcgtggaatccggaggtggactggtgcagccagggggatcgctcagactgagctgtgctgcttccgggtttaatataaaggatacctatatccattgggtccgtcaggcgcctgggaaaggcctggagtgggtcgctcgaatctatcccacaaacggatatacgcgatatgccgactctgtgaaagggaggttcactatatccgctgatactagtaagaacacagcgtacttgcagatgaatagtctgcgagccgaggatactgctgtgtattactgctccaggtggggtggggatggcttctatgccatggattattggggccagggtacattagtgaccgtttcctccgcatccaccaagggtcctagtgtgttccctttagcgcccagctccaagagcacctccggcggcactgcagcactcggctgtctggtcaaagactactttccagaaccggtcactgtgtcttggaacagtggcgccctgacatccggtgtccatacattccccgctgtgcttcaatcgagcggcctatacagtctgtccagcgtggtgactgttccttcatcttcactcggaacccagacatatatctgcaacgtaaatcataagccaagcaacacgaaagtcgacaagaaagtggagcccaagtcctgtgacaaaactcacacatgtcccccctgtccagcacctgagctcctggggggccccagtgtatttcttttccctccgaaacccaaggatactttgatgataagccgcacccctgaggtgacctgtgtggttgtggatgtgtcgcatgaggatccagaagtgaagttcaattggtatgtggacggggtcgaagtgcataacgccaaaaccaagccaagagaggaacagtataactctacctacagagtggtaagtgtgttgacagtgctccaccaggactggctcaacggcaaggagtataaatgtaaggtgtcaaacaaggcactgccagccccaatcgagaaaacgatctcgaaggccaaaggccagcctcgggaaccacaggtctacactctcccaccaagccgtgacgagctgaccaaaaaccaagtcagcttaacttgcttggtcaaggggttctatcctagcgatatagcggtggagtgggagagcaatggacaacctgagaataactacaagaccactcctcccgtcttggacagtgatggatcgttcttcctgtactctaagctgaccgtggataaatcgcggtggcagcaggggaacgttttcagctgctctgtcatgcacgaggccctgcataatcactacacacagaagtctttgtccctgtcccctggg

SEQ ID NO: 15925 - DNA, 1419 bp, synthetic construct
  misc_feature 1..1419: note = source = /note="Description of Artificial Sequence: Synthetic coding sequence"
  source 1..1419: mol_type = other DNA
atggcagtgatggcacctcgtacgctggtcctgctgctttcgggggcacttgccttgactcaaacgtgggcagaagtacagcttgtagagtccggcgggggacttgtgcaacctggtggatcccttcggctgtcctgcgcagcatcaggctttaacataaaggatacctacattcactgggtgagacaagctccaggaaaagggctcgaatgggtggcacggatttacccgacgaacgggtacacccgctatgccgactcggtgaagggcaggtttactatttccgcggacaccagcaagaataccgcctaccttcagatgaactccctgagggcagaagataccgcagtgtactactgttcaagatggggtggtgatggcttttacgccatggactactgggggcaggggaccctcgtgaccgtgtcctcggcttcgaccaaaggaccctcagtgtttccactggcccccagttcgaaatccacttcaggaggaaccgcggccctcggatgccttgtcaaggattacttcccagagcccgtgaccgtctcctggaattccggagccctgaccagtggagttcatacttttccggcggtccttcagagctccggactttacagcctttccagcgtcgtgaccgtgccatcgagctcgctgggtacccaaacttacatctgcaacgtgaaccataagccttccaacactaaggtggacaaaaaggttgagcctaagtcctgcgataagacccatacttgtcccccttgtccagcaccagaacttctgggtggaccttcggtgttcctctttccccctaagccgaaggatacccttatgatctcgcgtacccccgaagtgacctgcgttgtggtggatgtgtcccatgaagatcctgaggtgaagtttaactggtacgtcgacggagtcgaagtccacaacgcaaagactaagccacgcgaggaacagtacaattctacgtacagggtcgtgagcgttctgaccgtgctgcatcaggattggctgaacggcaaggagtacaagtgtaaagtctccaacaaagcacttccagcacccattgaaaagactattagcaaggcaaaaggtcagcccagagaacctcaagtgtacaccttgccgccaagccgggatgagcttactaagaaccaggtgtccctgacctgccttgtcaaagggttctacccatcagacatcgcagtcgagtgggagtccaacggccaacccgaaaacaattacaaaactaccccaccagtcctcgacagcgatggctccttttttctgtacagcaaacttaccgtcgacaagtcgcggtggcaacagggaaatgtgttctcctgctcggtgatgcatgaagcacttcataatcactacactcaaaagtcgctctcactgtcccctgga

SEQ ID NO: 15926 - DNA, 1419 bp, synthetic construct
  misc_feature 1..1419: note = source = /note="Description of Artificial Sequence: Synthetic coding sequence"
  source 1..1419: mol_type = other DNA
atggcagtgatggccccccggacactggtgcttctgctgtctggggccctggcgctcacacagacctgggcagaggtgcagctcgtggagtccggaggtggactcgtgcagcctggggggtcccttcggctctcctgtgctgcgtccggcttcaatattaaggatacctacatacattgggtgagacaggcccctggaaaggggctcgagtgggtagctaggatatatcctaccaatggatatactcggtacgcggacagtgtaaaaggccgattcacaatctcagcggatacaagtaagaacaccgcatatctgcagatgaattctctcagagccgaggacacagcagtgtattattgcagtcggtgggggggtgatgggttctatgctatggattattggggtcagggcactctggtgaccgtttcaagcgccagtacaaaaggcccaagcgtctttcccctggctcccagctccaaatctactagtgggggtacagccgcgctgggatgccttgtgaaggactacttcccagagcccgttaccgtgagctggaactcaggagctttgacgtccggcgttcataccttccccgccgtgctgcaatcttccggactgtatagtctgtccagtgttgtcaccgtgccctcctcctctctcggcactcagacctacatctgtaacgtgaaccacaaacccagcaataccaaggtggacaaaaaggtggagcctaaatcatgtgacaaaacacacacctgtcctccctgcccggcgcctgaattgcttgggggaccaagtgtttttcttttcccaccaaaaccgaaggacacactgatgatttctcggaccccagaagtgacctgtgtggtcgtggacgtgtctcatgaggatcccgaggtcaaatttaattggtatgtagacggggtggaagtgcacaatgcaaaaacgaaacccagggaagaacaatacaactcaacttaccgcgtggtctccgtgcttaccgtgcttcaccaggactggcttaatgggaaggaatacaaatgcaaggtcagcaataaggccctgccagcacctattgagaagacaatcagtaaggccaagggacagcctagagagccgcaggtttacacgctgcctccaagcagggacgagctgacaaagaaccaggtatccctcacatgcctggtaaagggtttctacccctccgacattgctgtggagtgggagtcaaacggacagcccgagaataattacaaaactaccccacccgttttggatagcgacggctcattttttctgtacagtaagctcactgtggataagagcagatggcagcagggaaacgtgttctcatgcagtgttatgcatgaagcactccataatcactacacccagaaatcactgagcctttcccccggg

SEQ ID NO: 15927 - DNA, 1419 bp, synthetic construct
  misc_feature 1..1419: note = source = /note="Description of Artificial Sequence: Synthetic coding sequence"
  source 1..1419: mol_type = other DNA
atggcagtcatggccccgcgcaccctggtgctgctgctttccggtgccctcgcactcactcaaacttgggccgaagtgcagctggtggaaagcggaggcggacttgtgcagccgggaggctcccttagattgtcctgcgcagcatcgggttttaacattaaagacacctatattcattgggtgcgacaagcgcctggaaagggccttgaatgggtggcacgaatctacccaaccaacggatacacccgttacgcagattccgtgaaaggtagatttaccatatccgcggacacgtcaaagaatactgcatacctgcaaatgaattcccttcgcgccgaggacaccgcggtctactactgctccagatggggaggagatggcttctacgctatggactactggggtcaaggtactctcgtcacggtgagcagcgcctccactaagggaccatccgtgttccctttggccccaagcagcaagtccacctcaggcggtactgcagcacttggttgtctcgtcaaggactatttccctgagcctgtcactgtcagctggaacagcggggcacttaccagcggtgtgcatacgttcccagcggttctccaatcgtcgggactgtactcactgtcgtctgtggtcaccgtgcccagctcaagcctgggaactcaaacttacatttgtaacgtaaaccataagcctagtaatacgaaggtcgataagaaggtggagcctaagtcatgtgacaagactcacacgtgtccaccatgccccgccccagaactgctgggtggtccatccgtgtttctgtttcccccgaagccaaaggatactctcatgatctcgagaaccccagaagtgacctgcgtggtggtcgatgtgagccatgaggatccagaagtgaagtttaactggtacgtggacggagtcgaggtccacaatgcaaagacgaagccgagagaagaacagtataactccacttaccgggtggtgagcgtgctcactgttttgcatcaggactggctgaacggtaaggaatacaagtgtaaagtgtccaacaaggcgctgcctgcacctattgaaaagaccatctcgaaagccaagggtcagccacgtgagccccaagtgtacaccctgccgccatcgcgggatgagctcaccaagaaccaggtgtcgctgacttgtcttgtcaaaggtttttacccttccgatatcgcagttgaatgggagtccaatggacaacccgagaataactacaagaccactccccctgtgcttgattccgatgggagcttttttctttattccaagctcactgttgataagagccggtggcaacaaggaaacgtgtttagctgctccgtgatgcatgaagcactgcataaccattacactcagaagtcgctttccctttcgccgggg

SEQ ID NO: 15928 - DNA, 1419 bp, synthetic construct
  misc_feature 1..1419: note = source = /note="Description of Artificial Sequence: Synthetic coding sequence"
  source 1..1419: mol_type = other DNA
atggctgtaatggcacctagaacattggttttacttttaagtggagctttagctttaactcaaacttgggcagaggtacagttagtagaatctggaggaggattagttcaaccaggaggatcacttagattatcatgtgctgctagtggatttaatattaaggatacttatattcattgggttcgacaagctccaggaaaaggattagaatgggtagctagaatttatcctacaaatggatatactcgatacgctgattcagttaaaggtagatttacaatttcagcagatacttcaaagaatactgcttatttacaaatgaattctttaagagcagaggatacagctgtttattattgttccagatggggaggagatggattttatgcaatggattattggggacaagggacacttgtaacagtctcatctgcttctactaaaggtccaagtgttttcccattagcaccatcatccaaatctacttcaggtggtacagctgctttaggttgtttagttaaagattacttcccagaaccagttactgtatcttggaattcaggtgcacttacttcaggagttcatacatttccagcagttcttcaatcttctggattatattcattaagttctgtagttacagttccaagtagttctcttggaactcaaacatatatttgtaatgtcaatcacaaaccatcaaatactaaagttgataagaaggtcgaacctaaatcatgtgataaaactcatacatgtcctccatgtccagcaccagaacttttaggaggaccatcagtttttcttttccctccaaaaccaaaggatactcttatgatttcaagaactccagaagttacttgtgttgttgtagacgtatcacatgaagaccctgaagtaaaatttaattggtatgttgacggagttgaagttcataatgctaaaacgaaacctagagaagaacagtataattctacatatagagtagttagtgttttaacagtattacatcaagactggttaaatggaaaagaatataaatgtaaagtatctaataaagcacttccagctccaattgagaagacaatttcaaaagcaaaaggacaaccaagagaaccacaagtttatactttaccaccatctagggatgaattaacaaaaaatcaagtatcattaacatgtttagttaaaggattttatccttcagatattgcagttgaatgggaaagtaatggacaaccagagaataattataaaacaactccaccagttttagattccgacggatcattttttctttattcaaaacttactgtagataaatctagatggcaacaaggaaatgtattttcttgtagtgttatgcatgaagcacttcataatcattatacccagaaaagtttatcattatcaccagga

SEQ ID NO: 15929 - DNA, 1419 bp, synthetic construct
  misc_feature 1..1419: note = source = /note="Description of Artificial Sequence: Synthetic coding sequence"
  source 1..1419: mol_type = other DNA
atggcggtgatggctccccggaccctcgtcctgttattaagtggggctttggctctgacacagacgtgggcggaggtgcagctggtcgagtctggcggggggctggtacagcctggcgggtcactgagattgtcctgcgcagcgtcaggtttcaatatcaaggatacatacatccattgggttcgccaggcacctggaaaaggtctggaatgggtggccaggatctatcccaccaatggctataccaggtacgccgattccgtgaaaggtcggttcaccatctccgctgacacttcaaagaacacagcctacttacaaatgaactccctacgtgcggaggacacagcggtgtactactgctcacgttggggtggtgacggcttctacgcgatggactattggggtcaagggactctcgtcactgtgtcttcagcctctaccaaaggaccatccgtctttcctctcgctccaagttcaaaatccacatccggcggcaccgccgccctgggatgtttggtcaaagactactttccagaacccgtgaccgtgagttggaattcaggcgccctcacctccggcgtacatacgtttccagctgtacttcaatcttccgggctgtacagcttaagctctgtggttacagtgccttcgagtagtttgggcacccagacttatatttgtaacgtgaaccataaaccatcaaataccaaagtggacaagaaggtcgagccaaagagctgtgacaaaactcatacatgtccgccttgtccagctcccgagctgcttggggggccgtcagtgttcttgttcccccctaagccgaaggacacgctaatgattagccggacgccagaggtgacatgtgtagtcgtagacgtaagtcatgaagatccggaagtgaaattcaattggtacgtcgatggcgtcgaggtccacaacgccaaaactaagcccagagaagaacagtacaactcaacctatagagttgtaagtgtgctaacggtcctgcaccaggattggctcaatggaaaggagtataagtgcaaggtgtccaacaaggctctacctgctccaattgagaagacaattagcaaagctaagggtcagccacgggaaccccaggtctacacactgccacccagtcgggacgagcttaccaaaaaccaggtttctttgacctgcctggtgaagggcttttacccatctgacattgctgttgagtgggagtccaatggccagcctgagaacaattacaagactaccccccctgttctggacagcgatgggagcttcttcctgtactccaaattgacggttgacaagtctcgatggcagcagggcaatgtctttagttgctctgtaatgcatgaagcgcttcataaccactatactcagaaaagtttgagtttatctcccgga

SEQ ID NO: 15930 - DNA, 1419 bp, synthetic construct
  misc_feature 1..1419: note = source = /note="Description of Artificial Sequence: Synthetic coding sequence"
  source 1..1419: mol_type = other DNA
atggcagtgatggctcctagaactctcgtccttcttctgtcgggagcgcttgcgctgactcagacgtgggcggaagtgcagttggtcgaatcggggggtggtctggtgcagcccggcggatcgctgagactgtcgtgcgccgcctcggggttcaacatcaaggatacctacatccactgggtgagacaagccccgggaaaggggcttgaatgggtggcacggatctacccgaccaatggttacacgcggtacgccgacagcgtgaagggacgcttcaccatctccgccgacacttcgaagaacaccgcctacctgcagatgaactccctgcgggctgaagataccgcggtttactactgttccaggtggggaggggatgggttctacgccatggactattggggacaaggcaccctcgtgactgtgtcaagcgcgtccactaagggaccatccgtcttcccactcgccccttcgtccaagtcaacctcgggtggaaccgccgcactgggatgtctggtcaaagactattttcctgagccggtcaccgtcagttggaattcaggtgcgctcacctctggcgtccacaccttcccggccgtcctgcagtcaagcggcctgtacagcctgtctagcgtggtcaccgtgccttcctcctcgctcggcacgcaaacttacatctgtaatgttaaccacaagccctctaacactaaagtcgacaagaaggtggaaccgaagtcatgcgacaagacccacacttgcccgccatgcccggccccagaactcctgggaggaccgtcggtgttcctcttcccgccgaagcctaaggataccctcatgatctcgcgaactcctgaagtgacttgcgtcgtggtggacgtgtcgcacgaagaccccgaggtcaagttcaattggtacgtggacggagtggaggtgcacaacgcgaagactaagccaagggaggagcagtacaattcaacctaccgggtcgtgtcagtgttgactgtgcttcatcaggattggctgaatggtaaagagtacaaatgtaaagtttccaataaggccctgcctgctcctattgaaaagaccatttcaaaagcgaagggccagcctcgcgagccacaagtgtacaccctgcctccttcgagggacgaacttaccaaaaatcaggtgtcgctgacctgtttggtgaaaggcttctaccctagcgatatcgccgtcgagtgggaatcgaacggacaaccggagaacaactacaagaccaccccgcctgtgctggactcggacggttcattcttcctgtactctaagctgactgtcgacaagtcgcggtggcagcagggcaatgtctttagctgctcagtgatgcacgaagcccttcacaatcattacacgcagaaatccttgtcgctgtcgcctgga

SEQ ID NO: 15931 - DNA, 1419 bp, synthetic construct
  misc_feature 1..1419: note = source = /note="Description of Artificial Sequence: Synthetic coding sequence"
  source 1..1419: mol_type = other DNA
atggcggtgatggcaccccgcaccctggtgctgctcctgagcggtgccctcgcgctgacacaaacgtgggctgaggtgcagctggtagaatcgggcggcggtctggttcagccgggcggctctctgcgactgtcttgcgcagcttcaggatttaatatcaaagatacctacattcactgggtgcgtcaggcgccaggtaaaggactggagtgggtggcaagaatctatcccacaaacgggtacacccggtacgccgatagtgttaaaggccgattcaccattagcgcagacacatcgaagaacaccgcctacttgcagatgaactcacttagggcggaggatacagcagtatactactgcagtcgctggggcggcgatgggttctatgccatggattactggggacaaggcaccctggtgaccgtgagtagcgctagcacaaagggccccagcgttttccctctggccccttccagtaaatctacttcagggggaaccgcggcgctgggttgcctggtcaaggactatttccctgagcccgtgacggtgtcatggaactcgggcgccctgacctccggagtccatacatttccggcggtgctgcagtcgagcggcttgtactccttgtccagtgttgtaaccgtaccctctagctccctgggaacgcagacttatatttgcaatgttaaccacaagccctcgaacaccaaggtcgacaagaaggttgagcccaagagttgcgacaagacgcatacttgcccgccatgccctgcccccgaattgctgggtggccctagcgtgttcttgtttccgccgaagccgaaggataccttgatgataagccgcacccccgaagtcacatgcgtggtagtggacgtgagccacgaagatccggaagttaagtttaactggtatgtcgatggcgtggaagttcataatgccaaaaccaagccgcgcgaggagcaatataattcgacttacagagtggtctcggtgttgactgtacttcatcaagattggctaaacggcaaggaatataagtgcaaagtgtctaataaggcgcttccggcgccgattgagaaaaccatctccaaggccaagggacaaccaagggagcctcaggtgtacacgctgcctccgagccgggatgagctcacgaagaatcaggtgagtctaacttgcctggttaaaggtttttatccctccgacattgcagtggaatgggagtcaaatggtcaacccgagaataattacaagacaacgcccccggtactggacagcgatggatccttcttcttgtatagtaagctgacagtggataaaagtaggtggcagcagggcaacgtcttcagctgcagtgtcatgcacgaggctctccacaatcattatactcagaagtctctgtccctgagtccagga

SEQ ID NO: 15932 - DNA, 1419 bp, synthetic construct
  misc_feature 1..1419: note = source = /note="Description of Artificial Sequence: Synthetic coding sequence"
  source 1..1419: mol_type = other DNA
atggccgtcatggcccctcgaacgttagtgttgctgctcagtggagctttagcactcacccagacgtgggccgaggtgcagctggtagagtctggcggtggcctggttcagcccggcggttcccttcggctgtcgtgcgcagcctccgggttcaacattaaagacacctatatccactgggtgcgacaagcgcccggaaagggcttggaatgggtcgctaggatttatcccacaaacggttacactagatacgccgattcagtcaagggtcgctttaccataagcgctgacacctccaagaataccgcttacctgcagatgaactctctcagagccgaggataccgccgtgtactactgctcacgctggggcggagatggcttttacgcgatggactactggggccaggggaccctggtcactgtgtcctccgccagcactaagggcccatctgtgttccccctggccccatcttccaaatccacatccggcggaactgccgcgctgggctgccttgttaaagattacttccccgagcctgtaaccgtttcttggaatagcggggccctgacgtctggtgtgcatactttcccggccgtgttacagtccagtggtctgtattccctttcctccgtcgttaccgtgccaagctccagcctgggaactcagacttacatctgcaatgtgaatcataagccaagcaacacaaaggtcgataaaaaggtagaaccaaagtcttgtgataaaactcatacctgtccaccctgtccagcccctgaactgctggggggaccgtctgtgttcttgtttccccccaaaccaaaggatacactcatgatcagccggacacccgaggtgacctgcgtcgtggtcgatgtgagtcatgaagacccagaggttaagttcaactggtatgtcgatggcgtggaggtgcacaatgccaagactaagccccgtgaggagcagtacaactcaacatatagggtggtgtcagtcttaacggtactgcatcaagactggctcaacgggaaggagtataaatgtaaggtgagcaataaagcattaccggcccctatcgagaagacaatctccaaggccaagggacagccacgcgaaccccaggtctatacgctgcctccatcacgcgacgaactaaccaagaatcaggttagcctgacctgcctggtgaagggattttacccctccgacattgcagtggaatgggagtctaacgggcagccagagaacaattacaagacaacacccccggtgctggatagcgacggaagcttctttctgtacagcaagctgacagtggataagtcaaggtggcaacagggcaacgtcttttcttgctcggtcatgcatgaggctctccataatcattacacacaaaagagtctgagcttgtcacccggt

SEQ ID NO: 15933 - DNA, 1419 bp, synthetic construct
  misc_feature 1..1419: note = source = /note="Description of Artificial Sequence: Synthetic coding sequence"
  source 1..1419: mol_type = other DNA
atggccgtgatggccccacgaaccctcgtccttctcctatcaggcgcccttgccctgactcaaacctgggcggaggtgcagcttgtcgagtcaggaggggggctcgtacagcctggtggctctctgcgtctgtcctgtgcagcaagcggttttaatataaaggacacctacatccattgggtcaggcaagctccggggaaaggtctcgagtgggtcgctagaatttatcctactaacggatacactcgctacgctgattcagtcaagggccggttcactatcagcgccgacacctcgaagaacacggcctatctacagatgaactccctgcgcgctgaagatactgccgtgtattactgttcccggtggggtggcgatggcttttatgccatggattactggggccagggtaccctggtcaccgtgtccagcgcatcaaccaaaggcccttcggtcttccctctggccccaagcagcaagtcaacaagtggggggactgctgcactgggttgtctagtcaaggattacttcccagagcccgtcaccgtgtcatggaactctggcgctctgaccagtggtgtgcatacatttccggctgtgctgcaatcatccggcctttattctctgtccagcgttgtgaccgtgcctagctcttccctcggcacacagacatatatctgtaatgtgaatcacaaaccctccaataccaaggtcgacaaaaaagtggaacccaagagctgtgataaaacccatacctgtccaccgtgccccgcacctgaactactgggcggtccatctgtcttcctttttccacctaaacccaaggacacattaatgatatcaaggacgcccgaagtgacgtgtgtagtcgtggacgtgagccacgaggaccccgaagtgaaattcaattggtatgtggatggggtggaagttcacaatgccaagacgaagccaagagaggagcagtacaacagcacataccgggttgtctctgtgctgaccgtgctgcaccaggactggctaaacggtaaggaatacaaatgcaaggtgtctaacaaggcgctgcccgccccaattgaaaagaccatttctaaagcgaaaggacagcctcgggagccacaggtatacacactaccgccatcgagggatgagctgaccaagaatcaggtgtctctgacctgtcttgtgaaaggcttctatccgtctgacatagctgttgaatgggagagcaacggccagcctgagaataactacaagactaccccacccgtcttggacagtgatgggtcttttttcctgtactctaaactgaccgtggataaatcgagatggcagcagggcaacgtcttcagctgttctgtcatgcatgaagctttgcataaccactatacccagaagtctctgtctctcagcccggga

SEQ ID NO: 15934 - DNA, 1419 bp, synthetic construct
  misc_feature 1..1419: note = source = /note="Description of Artificial Sequence: Synthetic coding sequence"
  source 1..1419: mol_type = other DNA
atggccgtgatggcacctaggacgctagtgcttctcctatcaggtgcgcttgctctgacgcaaacatgggcagaagttcagctggtggagtcaggaggaggtctagtccagcccgggggaagcctaagactttcctgtgccgcttctggatttaacatcaaggatacttacatccattgggttcgccaggcaccaggcaaaggcttggaatgggtggcccggatctaccctaccaacggatacacaaggtatgcggacagtgtcaaaggccggttcactatttcagcagacacttcaaaaaacacggcttacctgcagatgaactccctgcgagccgaggacactgccgtttattattgtagtcgatggggtggagatggtttttatgccatggattactggggacaggggaccttagtgacggtgtcaagtgccagtacaaaaggcccctccgtgtttcctctagcgcccagtagcaagagcacatccggaggaacagccgctctgggttgtctcgtgaaagactattttccagagcccgtgacggtgagttggaacagcggcgcgctgacttccggtgtacatacattccccgccgtgcttcaatctagcggcttatatagtctgtcctctgtggtgactgtgccaagctcatctcttggaacccaaacctacatatgcaacgtgaaccataaaccttcaaatactaaagtggataagaaagtggagcccaaatcatgtgacaagactcatacctgcccaccttgtcccgcacccgaactcctcggcgggcccagtgttttcctgttcccccccaagcccaaggatacacttatgataagccgcaccccggaagtaacctgtgtggtggtcgatgtgtcccacgaagatccagaggtaaagtttaactggtacgtggacggcgtggaggtgcacaacgctaagaccaagcccagagaagagcagtacaactccacttatagagtcgtgagcgtcctgacggtcctgcatcaagactggctgaacgggaaagaatacaaatgtaaagtatcgaataaggccctcccagctcccattgagaaaaccatttccaaggcgaaagggcagccacgcgagccccaggtgtatacactccccccgagtagagacgagctgaccaagaatcaggtgtcccttacatgtctcgtaaaagggttttacccgtcagacatcgctgtcgagtgggaatcgaatggacagccagaaaacaactataagacaactccccctgtcctcgactccgatgggagtttttttctctactccaaattaacagtcgataaatccagatggcagcagggaaacgtgtttagctgctcagtgatgcatgaagcgttgcacaaccactatacacagaaatccttatccctgtctcccggg

SEQ ID NO: 15935 - DNA, 1419 bp, synthetic construct
  misc_feature 1..1419: note = source = /note="Description of Artificial Sequence: Synthetic coding sequence"
  source 1..1419: mol_type = other DNA
atggccgtcatggcgccaagaacgctggtcctgctgctctcgggagcgctggccctgactcagacttgggcagaggtgcagctggtcgagtcgggcggaggcctcgtccagcccgggggttcacttcgcctgtcatgcgccgcatcaggtttcaatatcaaagacacttacatccattgggtccgccaggcacctggcaaggggctcgagtgggtggcccgaatttaccccactaacggctacaccaggtacgcagattcggtaaagggtaggttcactatttcggctgatactagcaagaataccgcttatctgcaaatgaattctctgagagccgaggacaccgccgtctactactgctcacggtggggaggcgacggattttacgccatggattactggggacaaggaactctcgtgacggtgtcctccgcatccaccaaggggccatcggtattcccactggcgccgtcgtctaagtccaccagcggtggaaccgcggccctcgggtgcctcgttaaggattactttccagagccggtgactgtgagttggaattctggcgcactcacctcaggtgtccatactttcccggcggtgttgcaatcctctgggctctacagcctcagttctgtcgtgaccgtccccagctccagccttggaacccaaacttacatctgcaatgttaaccacaagccgtctaacaccaaggtcgacaagaaagtggaaccaaagtcgtgtgacaaaactcatacttgcccgccatgccctgctccagaattgctcggcggcccctcggtgttcctgttccctccgaaaccgaaagacacgctgatgatcagccggaccccagaggtgacctgtgtcgtggtggacgtgtcccatgaggaccctgaagtgaaattcaactggtacgtcgacggagtggaagtgcacaacgccaagactaagccgcgcgaggaacagtacaatagcacgtaccgcgtggtgtccgtgttgaccgtgctgcaccaagattggctgaacgggaaagagtacaagtgtaaggtgtcgaacaaggctctgcctgcacctatcgaaaaaaccatctccaaagcgaagggacagcctcgggagcctcaagtgtacaccctgccgccgagtcgcgatgaactgactaagaatcaggtgtcgttgacgtgccttgtcaagggattctacccgagcgacattgccgtcgaatgggaaagcaatggacagccggaaaacaactataagaccaccccgccggtgttggactcggatggctccttttttctctattcaaaactgaccgtagataagtcccggtggcagcagggaaacgtgttcagctgtagcgtgatgcacgaagcgctgcataaccactacactcagaagagcctttcgctgtcaccaggg

SEQ ID NO: 15936 - DNA, 1419 bp, synthetic construct
  misc_feature 1..1419: note = source = /note="Description of Artificial Sequence: Synthetic coding sequence"
  source 1..1419: mol_type = other DNA
atggcggtgatggctcctcgcactctggtgcttcttctttcgggagcactcgctctgacccaaacttgggcagaagtgcaactcgtagagtccggagggggactcgtccaaccggggggctcactgagactttcctgtgcagcgtcaggattcaatatcaaggacacttacattcactgggtgagacaggcacctgggaaaggtctggaatgggtggctcgtatttaccctactaatggttacacccgatatgcagattccgtgaagggtcgcttcactatctcagctgacacctccaagaacaccgcatacctgcagatgaatagcctgcgagcggaggatacggccgtgtactactgttcccgctggggtggagatggattttacgcaatggattactgggggcagggtactctcgtgaccgtgagcagcgcttcgactaagggaccttcagtctttccgctcgccccgagctcgaagtccacttccggaggtacggctgcactcggatgcctggtgaaggattacttccctgaacccgtgactgtgtcgtggaacagcggtgccctgacttcgggcgtgcatacctttccagccgtcctgcaatcatcgggtctttactcgttgtcgtccgtggttaccgtcccctcatcgtcgctcgggacgcagacttacatttgtaatgtcaaccataagccttcaaacaccaaggtggataagaaagttgagcctaagtcatgtgacaaaacgcatacctgcccgccctgccctgcaccagaacttctgggcggaccctcagtttttctttttccaccaaagcccaaggatactctcatgatctccaggactccagaggtcacctgtgtggtggtcgacgtgtcgcacgaagatcctgaagtgaagtttaactggtatgtcgacggtgtggaagtgcacaatgccaagacgaagcctagggaagaacaatacaactcgacctatcgagtggtgtccgtgcttaccgtcctgcatcaggattggcttaacgggaaggagtacaagtgtaaggtgtcaaataaggcacttcccgcacccattgaaaaaactatttcgaaagcgaagggccaacccagggagcctcaagtgtacactctgcctccctccagagacgaattgacgaagaaccaagtctccttgacctgtctggttaagggcttttacccgtcggacatcgcagtcgaatgggagtctaacggtcagcccgagaacaattacaagaccacccctccagtgctcgattccgatggcagctttttcctttacagcaagctgactgtggataagtcaagatggcaacaggggaacgtgttttcctgctccgtgatgcatgaagcattgcataaccactatactcaaaagtcactttccctttcgcctggg

SEQ ID NO: 15937 - DNA, 1419 bp, synthetic construct
  misc_feature 1..1419: note = source = /note="Description of Artificial Sequence: Synthetic coding sequence"
  source 1..1419: mol_type = other DNA
atggccgtgatggcaccgcggaccctggtgctgctgctgtcgggggccttggcattgactcaaacctgggctgaagtgcaactggtggagagcggaggaggcctggtgcaacctggcggatcgctccgccttagctgcgcggcgtcgggatttaacatcaaggacacttatatccactgggtcagacaggcgccgggcaagggccttgagtgggtggcgagaatctacccaactaatgggtacacgaggtacgccgactcggtgaagggaagatttaccatcagcgcagacacctccaagaatactgcatacctgcagatgaactccctgagagcagaagataccgctgtgtactactgctccagatggggtggtgacggattctacgccatggattattggggacaaggaacgctcgtcaccgtgagctccgcttccactaagggaccgtcagtgttcccgctggcgccgtcgtcgaaatccacttcaggcggaaccgctgccctcggatgcctggtcaaagattacttcccggagccagtcactgtgtcctggaacagcggtgccctgacttccggcgtgcatactttcccggccgtgcttcagtccagcggactgtactccctctcgtcggtggtgaccgtgccgtcatcatcactgggaacccaaacttacatttgcaacgtgaaccataaacccagcaacaccaaagtggacaagaaggtcgagcccaaaagctgcgacaagactcacacgtgccctccatgcccggcacccgaactcctgggtggccctagcgtgtttctgttcccaccaaagcctaaggatactcttatgatcagccgcactccggaggtcacctgtgtggtcgtggacgtgagccatgaagatccggaagtgaagttcaattggtacgtcgacggggtcgaagtccataatgccaagacgaagccgcgggaagaacagtacaattcgacttacagagtggtcagcgtgctgaccgtgcttcaccaggactggctgaacggaaaggaatacaagtgcaaagtctcgaataaagcgctgccagccccgatcgaaaaaaccatcagcaaggcaaagggacaaccgagagagccgcaagtgtacactctgccaccctcaagagacgaactgaccaagaatcaagtgtccctgacctgtcttgtgaaggggttctacccatccgacatcgcagtggagtgggagtcgaacggacagccagagaataactacaagactactcctccagtgttggattcagacggatcctttttcctgtactcgaagctgaccgtggacaagtcgcgctggcaacagggaaatgtgttctcgtgttcggtcatgcacgaagcgctgcacaaccattacacccaaaagtccctctcactgtccccgggt

SEQ ID NO: 15938 - DNA, 1419 bp, synthetic construct
  misc_feature 1..1419: note = source = /note="Description of Artificial Sequence: Synthetic coding sequence"
  source 1..1419: mol_type = other DNA
atggcggtgatggcgccgcggaccctcgttctcctgctgtctggggccctcgcactgactcagacctgggcggaagtgcagctcgtcgaatcggggggaggactggtgcaaccaggcggatccctgcgcctgtcatgcgccgcctccggcttcaacatcaaggacacctacattcactgggtgcggcaggccccagggaaaggtttggagtgggtggctcgcatctatccgaccaacggatacacccggtacgccgatagcgtgaaaggaaggttcaccatcagcgcagatactagcaagaacaccgcgtacctgcaaatgaacagcctgcgcgctgaggacacggcggtgtactactgtagccgatggggcggagatggattctacgcaatggactactggggacaaggaaccctcgtcaccgtgagctccgccagcactaaggggccctcagtgttccctctggcgccgtcgtccaaaagcacctctggcgggaccgccgcactgggatgcctcgtgaaggactatttcccagagcctgtcacggtgtcttggaattcgggagccctgacttcaggagtccacacctttccagcagtgctgcagagctcgggactgtactcactgagctcggtcgtcaccgtgccatcgagctctctcggcacccagacgtacatctgcaacgtgaaccacaaaccatcgaacaccaaggtcgataagaaggtagaacccaaatcctgcgataagactcacacctgccctccgtgccctgctcctgaacttctgggaggaccttccgtattcctgttcccaccgaagccgaaggatactctgatgatcagcagaactccggaggtgacctgcgtggttgtggatgtgagccatgaggacccggaagtgaagtttaactggtacgtcgacggagtggaggtgcataacgcaaagacgaagcctcgggaagaacagtacaattccacgtacagggtggtttccgttctgaccgtgctgcatcaggattggttgaacggaaaggagtacaagtgcaaggtgtcaaataaggctctccctgctcctatcgaaaagactatttcaaaggctaagggtcagcccagggagcctcaggtctacactctgccgccatcgcgcgacgaacttacgaagaaccaagtcagcctcacttgcctggtcaagggattctacccgtcagacattgcggtggagtgggaatccaacggccaaccggagaacaactacaaaaccactccgccggttctggatagcgacgggtccttctttctgtactccaagctgactgtggataagtcacgctggcaacagggaaacgtgttctcatgtagcgtcatgcacgaagccttgcataatcattacactcagaaatccctgtcactgtccccgggt

SEQ ID NO: 15939 - DNA, 1419 bp, synthetic construct
  misc_feature 1..1419: note = source = /note="Description of Artificial Sequence: Synthetic coding sequence"
  source 1..1419: mol_type = other DNA
atggccgtcatggctcccaggacattggtgctcctcctctcaggcgcattggcattaacacaaacctgggctgaggtgcagctggtcgagagtggaggcggactcgtgcaacccggaggaagcctgagactgagttgtgcagcttccggtttcaacattaaggacacctacatccactgggtgcgccaggcaccaggtaaaggcctggagtgggtcgccaggatataccctacgaacggctatacacggtatgccgattctgtgaaaggtcggtttactatatccgcagacaccagcaagaacacagcgtacctgcagatgaactctctgcgcgcagaggacactgctgtgtactactgttccaggtggggaggagacggcttttacgccatggattactggggacagggcaccttggtgaccgtaagctcggccagtactaaggggccaagcgtctttccactggcaccgagttctaagagcacctctgggggtacagccgctctcggttgcctcgtaaaagactacttccctgagccagtgaccgtgagctggaactccggcgcattgacctctggcgtgcacacatttcctgccgtgttgcagtcatcagggttatactctcttagtagcgtcgtgaccgtgccctcctcttccttgggcacacagacgtatatatgtaacgtcaatcacaaacctagtaatactaaggtggataagaaagttgagcctaagtcatgcgataagacccacacttgccccccctgtcccgcccccgaattgctgggtggcccttccgtcttcctgtttccaccaaaacccaaagacaccttaatgataagccgtacacctgaggtgacttgtgttgtggtagacgtcagccatgaggacccggaggttaaatttaactggtacgtagacggagtggaggttcataatgcaaaaaccaagccacgggaggaacaatataactccacctacagagttgtctctgtgctcacagtccttcaccaggactggctcaacggtaaggagtacaagtgtaaggtctcaaataaagctctgccagcccctattgagaagaccatctccaaagctaaggggcagcccagggagccgcaggtgtatactctgcctccctcccgcgacgaactgaccaaaaatcaagtcagcctaacatgcctggtgaaaggcttctacccatctgacatagccgtggagtgggagagcaatgggcagcctgagaacaactacaaaaccaccccacctgtcctggattccgatggttcattctttctatattccaagctgacggtcgataagagccggtggcaacagggcaatgtattctcttgcagcgttatgcacgaggccttgcacaatcactacacacagaaatcactttctttgagcccaggg

SEQ ID NO: 15940 - DNA, 1419 bp, synthetic construct
  misc_feature 1..1419: note = source = /note="Description of Artificial Sequence: Synthetic coding sequence"
  source 1..1419: mol_type = other DNA
atggctgtgatggctccgcggactctggtgctgctcctgtcaggagcgctggctctgactcaaacgtgggccgaagttcaactggtggaatcgggaggaggccttgtccaacctggaggctccttgcgcctgtcatgcgcggcgtcggggttcaacatcaaggacacttacatccattgggtcagacaggcacctggaaagggattggagtgggtcgcccgaatttacccaactaacggatacaccagatacgccgacagtgtgaagggtcggttcaccatcagcgcagacacctctaagaatacggcctacctgcagatgaactctctgcgcgcggaggacactgccgtgtactactgctcgcgctggggcggagatggattctacgccatggattactggggccaggggactctcgtcactgtgagctcagcatcaactaagggaccgtccgtctttccactggccccgtcgtcgaagtctacctcggggggaaccgcggccctgggatgcctcgttaaggattacttccctgagcctgtgaccgtgtcatggaattctggtgcgctgaccagcggtgtgcataccttcccagccgtgctccagtcctccggcttgtatagtctcagctccgtcgtcaccgtcccatcatcctcccttgggacccaaacgtacatctgcaatgtgaaccacaagccatcgaacaccaaggtcgataagaaagtggagccgaaatcatgtgacaaaacgcacacgtgcccgccgtgtccggctccggagctcctgggcggcccgtccgtgtttctgtttccccctaaaccgaaggacaccctgatgatatcgcgcactccagaagtcacctgcgtcgtcgtcgatgtctcccacgaggaccccgaggtgaagttcaattggtacgtagacggtgttgaagtgcacaacgccaaaaccaaaccgagggaagaacagtataacagcacttaccgggtcgtgtcggtgctcactgtgttgcatcaagattggctcaatggaaaggagtacaagtgcaaagtatccaataaggcactgcctgcgcccatcgaaaagaccatcagtaaagctaaggggcagccgagggaaccgcaggtttacacccttccacccagccgagatgagcttactaaaaaccaggtttccctcacttgcttggtgaaggggttctatcctagcgacattgctgtggaatgggaatccaacggacagccagagaataactacaaaactacgccacccgtgctggactcggacggcagttttttcctgtactcaaagctcactgtggacaagagccggtggcaacagggaaacgtgttcagctgttccgtgatgcacgaagcactgcataaccactacacccagaagtccttgtccctctctcctgga

SEQ ID NO: 15941 - DNA, 1419 bp, synthetic construct
  misc_feature 1..1419: note = source = /note="Description of Artificial Sequence: Synthetic coding sequence"
  source 1..1419: mol_type = other DNA
atggctgttatggcaccccgaacccttgtcctactgctttcgggggctctggcccttacacagacttgggccgaggttcaactggtggaatccggtggaggtctcgtccaacctggcggctcacttaggctttcctgcgccgcttctgggttcaacatcaaagatacctacatccattgggttcggcaagctccggggaaaggtctggaatgggtggcgcggatttatcccaccaatggttacaccaggtatgctgattctgtcaagggacgattcacaatctcggccgatacctcgaagaacacagcatacttgcaaatgaatagcctccgggctgaggacacagctgtgtattattgctcacgctggggaggtgatggcttctatgcgatggattactggggacagggcacgcttgtgaccgtctcaagcgcaagcacgaagggcccgtccgtgttccctttagccccatcctccaaatcaacctcggggggtactgccgccttaggatgcctggtcaaggactattttccagaacccgtgactgtgtcctggaattcgggggctctgacctccggtgtccatacgttccccgctgtgttgcagagtagcggcctttattccttatcctcagtggtgactgtcccgtcaagctccttgggcactcagacctatatctgtaacgtcaatcacaagccgagtaacacaaaagtggacaaaaaggttgaaccgaagtcgtgcgacaagacacacacttgccctccgtgtcccgctccagagttattaggcgggccgagtgtgttccttttccctcctaagcctaaagataccctgatgattagtcgcaccccagaagtcacatgcgtggtggtcgatgtctcacatgaggacccagaagttaaattcaactggtatgtagacggagtcgaggtccataacgcaaagactaagccccgtgaagagcagtacaactccacatatcgcgttgtttctgtgttgacagtcttacaccaggactggttaaatggtaaagaatacaagtgcaaggtcagcaataaagcattgcctgcacctattgagaagacgatctcaaaggccaagggccaaccccgagagccccaggtttataccttacctccgagcagagacgagcttactaaaaaccaggtttcacttacatgcctcgtcaaaggattttatccctcagatatagcagttgaatgggagagcaacggacagcctgagaacaactataagacaacaccacccgttcttgactccgatggtagcttctttttgtattcaaagcttacagttgataaatctcggtggcagcaggggaacgtattctcgtgttcagttatgcatgaggcgctacacaaccactatactcaaaagagcctgagcctctcccctggg

SEQ ID NO: 15942 - DNA, 1419 bp, synthetic construct
  misc_feature 1..1419: note = source = /note="Description of Artificial Sequence: Synthetic coding sequence"
  source 1..1419: mol_type = other DNA
atggccgtgatggctccaagaacgctggtgctgttgctgtcgggggccctcgccctcacccaaacctgggcagaggtacaacttgtcgagtccgggggcggactggtccagccaggaggctcgctccgtctgagctgcgcagcctccggattcaacattaaagacacgtatatccactgggtgcgccaggcgccgggaaaggggctcgagtgggtcgcccggatatacccgaccaacggatacacgcgctacgcagatagcgtcaagggaagattcactatcagcgccgatacgtcaaagaacactgcttatctgcagatgaattcgctgagagctgaagataccgcagtgtactactgctcgcgctggggtggagatggcttttacgccatggactactggggacagggaacccttgtgactgtgtcgtctgcgagcactaaaggcccatcggtgtttccgctggcgccatcctcgaagagtacctccggtggcacggcggcgcttggctgtctcgtgaaagactactttccagagccggtcactgtgtcttggaacagcggagcactgacttcgggggtgcacactttcccagccgtgcttcagtcgtccggtctgtacagtttgtccagcgtggtgactgttccatcgagctctctgggaacccaaacttacatttgcaatgtgaaccataagccgtcaaataccaaggtggacaagaaggtcgagccaaagtcgtgcgacaagacccacacttgccctccgtgcccagccccagaactgctgggtgggccgtctgtgttcctcttcccgccgaaaccgaaggatacccttatgatctccagaactccggaagtgacctgtgtggttgtagatgtgagccatgaggatccggaagttaagttcaactggtacgtggacggagttgaagtccacaacgctaagactaagcctcgcgaggagcagtacaatagcacttacagggtcgtgtcagtcttgaccgtgcttcaccaagactggctgaacggcaaggaatacaaatgcaaagtctctaacaaggccctccctgcacctatcgagaaaactatctccaaggcaaagggacagccccgcgagccccaggtgtatactctgcctccgagccgggacgaattgaccaaaaatcaggtgtcactgacctgcctcgtcaagggcttttacccttcagacatcgctgtggaatgggaatccaatggacagccggaaaacaattacaagaccacccctccggtgctggactcggatggatccttcttcctctactccaaactgacggtggacaaatcacggtggcaacaggggaacgtattctcctgttcagtcatgcacgaagcgctccataaccattacacccaaaaaagcctgtctttgtcgccgggg

SEQ ID NO: 15943 - DNA, 1419 bp, synthetic construct
  misc_feature 1..1419: note = source = /note="Description of Artificial Sequence: Synthetic coding sequence"
  source 1..1419: mol_type = other DNA
atggcggttatggcgccgcgaacgttagttttactattatcgggtgcgttagcgctaacgcaaacgtgggcggaagttcaactagtagaatcgggtggtggtttagtacaaccgggtggttcgttacgtttatcgtgtgcggcgtcgggttttaatataaaagatacgtatatacattgggtacgtcaagcgccgggtaaaggtttagaatgggtagcgcgtatatatccgacgaatggttatacgcgatatgcggattcggttaaaggtcgttttacgatatcggcggatacgtcgaaaaatacggcgtatttacaaatgaattcgctacgagcggaagatacggcggtatattattgttcgcgttggggtggtgatggtttttatgcgatggattattggggtcaaggtacgctagtaacggtttcgtcggcgtcgacgaaaggtccgtcggtatttccgttagcgccgtcgtcgaaatcgacgtcgggtggtacggcggcgttaggttgtttagtaaaagattattttccggaaccggtaacggtatcgtggaattcgggtgcgttaacgtcgggtgtacatacgtttccggcggttctacaatcgtcgggtttatattcgctatcgtcggtagttacggttccgtcgtcgtcgctaggtacgcaaacgtatatatgtaatgtaaatcataaaccgtcgaatacgaaagtagataaaaaagtagaaccgaaatcgtgtgataaaacgcatacgtgtccgccgtgtccggcgccggaattattaggtggtccgtcggtatttttatttccgccgaaaccgaaagatacgctaatgatatcgcgaacgccggaagttacgtgtgttgtagtagatgtatcgcatgaagatccggaagttaaatttaattggtatgttgatggtgtagaagtacataatgcgaaaacgaaaccgcgagaagaacaatataattcgacgtatcgtgtagtatcggtattaacggtattacatcaagattggttaaatggtaaagaatataaatgtaaagtatcgaataaagcgctaccggcgccgatagaaaaaacgatatcgaaagcgaaaggtcaaccgcgagaaccgcaagtatatacgctaccgccgtcgcgagatgaattaacgaaaaatcaagtatcgctaacgtgtttagtaaaaggtttttatccgtcggatatagcggtagaatgggaatcgaatggtcaaccggaaaataattataaaacgacgccgccggtattagattcggatggttcgttttttctatattcgaaactaacggtagataaatcgcgatggcaacaaggtaatgtattttcgtgttcggttatgcatgaagcgttacataatcattatacgcaaaaatcgttatcgttatcgccgggt

SEQ ID NO: 15944 - DNA, 1419 bp, synthetic construct
  misc_feature 1..1419: note = source = /note="Description of Artificial Sequence: Synthetic coding sequence"
  source 1..1419: mol_type = other DNA
atggccgtgatggcaccccgcacgttggtgctgctgcttagcggggcgctggcactgacccagacttgggcggaggtccaactggtcgaatcaggtggggggcttgtgcagccaggtggttccctgagactttcttgtgcggcatccgggtttaacatcaaggacacctacattcactgggtcagacaagcccccggaaaaggactggaatgggtcgcacgcatttaccccactaacggctacactagatacgctgactcggtgaagggtaggtttaccatcagcgcagacacttcgaagaatactgcgtatcttcagatgaactcactcagagcagaggacacggcagtgtactactgctcccgttggggaggtgatgggttctacgcaatggattactggggtcaaggtactctggtgactgtcagctctgcatcgactaagggaccttcggtgtttcctcttgctccatcgtcaaagtccacctcaggtggaactgcggcacttggatgtcttgtgaaggactactttcctgagccagttactgtgtcttggaactcgggtgccctcactagcggtgtgcatacctttccagccgtcctccaatcctcgggtctgtacagcctctcctcggttgtgacggtgccaagctcctcactgggcacccagacctacatctgtaatgtgaatcacaagccctccaatactaaagtggataagaaagtcgagcctaagtcgtgcgacaaaacccatacgtgccctccatgcccagcaccggaactgcttggcggaccatcggtctttctcttccctccgaagcctaaggacacccttatgatcagcaggaccccagaagtcacttgcgtggtggttgacgtgtcccatgaagatccggaagtgaagtttaactggtatgtggacggtgttgaggtgcataacgccaagactaaaccccgggaagaacagtacaactcaacctaccgcgtggtgtcggtgctgaccgtgcttcaccaggattggctgaatggaaaagaatacaagtgtaaagtctctaataaggcattgcctgcccctatcgaaaagactatctccaaggcaaagggtcaaccacgagagcctcaagtgtacactctcccgccttcgagggacgagctgacgaagaaccaggtcagcctcacctgtcttgtcaagggcttttaccctagcgatatagcagtggaatgggagagcaacggacaacccgaaaacaactacaagaccacccctccagtgctcgattccgatggcagcttctttctttactcgaagctgacggttgataaatcccgctggcaacaaggtaatgtgttctcatgtagcgtgatgcatgaggcgctgcataatcactacacccaaaaatcgctgagcctgtcaccgggg

SEQ ID NO: 15945 - DNA, 1419 bp, synthetic construct
  misc_feature 1..1419: note = source = /note="Description of Artificial Sequence: Synthetic coding sequence"
  source 1..1419: mol_type = other DNA
atggccgtgatggcgcccagaacactggttttgttgctttcaggggcccttgccttgacgcagacatgggcggaggtgcagctggttgaatccggagggggcctggtgcagcccggcggatccttacggttgtcctgcgcagcttctgggttcaacatcaaggatacctatatacactgggttagacaagctcccggaaagggactagagtgggtggcacgcatttatcctacgaacggctatacgcggtacgctgactctgtcaaaggacgatttactatctccgccgatacgagcaaaaatacagcctacctgcagatgaattccctgagggcggaagatacagctgtgtattactgttctagatgggggggcgatgggttttatgcaatggattattgggggcagggaacactggtgactgtctcatcggcttcgactaagggaccctcagtgtttcctctggcccccagtagcaagtctactagcggaggcaccgccgctctgggatgcctcgttaaggattatttccccgagcccgtaaccgtttcttggaacagtggagctctgacaagtggggtacatacctttcccgcagtcctccagagcagtggactatactcccttagctcagttgtcaccgtgccttcttccagcctcgggactcagacatacatttgcaatgtgaaccacaaaccctccaacaccaaagtggacaagaaggtagagcctaagagttgcgataaaacacacacctgccctccttgtcctgccccagaactgctgggcggaccctccgtcttcctgttcccaccgaaaccgaaagacaccctcatgattagtcgtactcccgaggttacctgcgtcgttgtggacgtttcgcacgaagatccagaagttaagttcaattggtacgttgacggcgttgaggttcacaatgctaagaccaagccaagggaggaacaatacaattctacatatcgagtggtgtctgttctgactgtgctccaccaggactggctgaatggcaaagaatacaaatgtaaagtctccaacaaagcactgccggcccctatcgagaagacgatctccaaagccaagggccaacccagggagcctcaagtttataccctgccaccaagtcgcgatgaattaactaagaatcaggtcagtctcacctgcctggtgaaagggttctacccaagtgatatcgcagtggaatgggaaagtaacggccagccggagaataattacaaaacaaccccgccagtgctggatagcgatggatccttctttctgtatagcaaactgaccgtcgacaagagcagatggcagcagggtaatgtgttttcatgtagcgtcatgcatgaagcgttgcacaatcactacacacagaagtccctgtcactgtcacccggg

SEQ ID NO: 15946 - DNA, 1419 bp, synthetic construct
  misc_feature 1..1419: note = source = /note="Description of Artificial Sequence: Synthetic coding sequence"
  source 1..1419: mol_type = other DNA
atggctgtaatggccccccggactctggtactcctgctttcaggagctctcgcattgacacagacttgggcggaggtacagctagttgaatctgggggagggctcgtacagcccggaggaagtttaagactctcatgtgcagcctctgggttcaatattaaagacacttatattcactgggttcgacaggccccaggaaaagggttggaatgggttgcacgaatttatcccacaaacgggtatacacgttatgcagattccgtgaaaggaaggtttacaataagtgccgatacatcaaaaaacactgcgtacctgcagatgaactccttacgggccgaagacacggccgtgtactactgttccagatgggggggggatgggttctatgctatggattattggggacaggggactctggtgactgtatctagtgccagtactaagggaccttcggtctttcccctggcaccatccagtaagtctacatccggagggacggccgccctagggtgtttggtcaaagactatttccctgaacccgtgacagtgtcatggaactccggagccctcacatccggggtccacacattccccgccgtgctgcagtcttctggactgtactccctttcttccgtggtcactgtaccttctagttcactcgggactcagacttatatctgcaacgtcaaccacaaaccatccaacacaaaagttgacaaaaaagtcgagcccaagtcctgcgataaaactcacacatgcccaccttgtcccgcgccagaactactgggaggaccatccgtattcctgttccccccaaagcccaaagatacactgatgataagtcggacacccgaagttacatgcgtggtggttgatgtgtcacatgaagatcccgaagtcaaattcaattggtatgtagatggagtcgaagtccacaatgcaaaaacaaagccacgggaggaacagtataattcaacttacagggtcgtatcagtgctgactgtgctccaccaggattggctcaacggaaaagaatataaatgtaaggtatcgaataaggctttacccgcaccaatagagaaaactatttctaaagccaaagggcagcctcgcgaaccccaggtgtatacgttgccccccagtcgggatgaactcactaagaaccaggtgagtctaacatgtctcgtgaaagggttctaccctagtgatatcgcagtggaatgggaatctaatggacagcccgaaaacaactataagactactccacctgtcctcgattcagatgggagtttttttctatatagtaagctgactgtcgataaatctcggtggcagcaagggaatgtcttctcttgttctgtgatgcacgaagctctgcataaccactacacacagaaaagtttaagtctgtctcctgga

SEQ ID NO: 15947 - DNA, 1419 bp, synthetic construct
  misc_feature 1..1419: note = source = /note="Description of Artificial Sequence: Synthetic coding sequence"
  source 1..1419: mol_type = other DNA
atggcagttatggccccacgaaccctggtgctgctgttgtctggcgccctggcattgacccagacctgggctgaagtccagctcgtggaaagcggaggcggactggtgcagcccggaggatctctgcgtctgagttgtgccgcttcaggcttcaacataaaagacacctatattcattgggtgcgtcaggcccctggaaagggtctcgaatgggtggcaaggatttaccccactaatgggtacacccgctatgctgactctgtcaaagggaggtttacgatctccgcagatactagtaagaatactgcctacctgcagatgaattcgctgagagcagaggacactgctgtttattactgcagtcggtgggggggcgacggcttttacgcgatggattactggggtcagggcacccttgtgactgtcagctccgcatcaacaaaaggccctagcgtttttccactggcaccttcatccaagagcacttccggagggacagccgccctgggatgcctggtcaaggactattttccagaaccagtcactgtgtcttggaactcaggggcactcacaagcggcgtccacacctttcccgcggtgctacagtcttcagggctctatagtttaagttcagtggttaccgtcccgtcctcatctctggggacacaaacgtatatctgcaatgtgaaccacaagccgagtaatacaaaagtcgataagaaggtagagccaaagtcatgtgacaagacacatacatgccccccttgcccagcccctgagctcctggggggaccaagcgtgtttttgttcccccccaagcccaaagatacgctgatgatttccaggacacccgaggtgacatgcgtcgtcgtggacgtctctcatgaagacccggaagtgaagttcaactggtatgtggatggcgtggaggtccataacgcaaaaacgaaaccgcgagaggaacagtataactccacctatagggtggtttctgtgcttacagtccttcaccaggactggctgaacggcaaggaatacaagtgtaaggtatctaacaaagccctgcccgcgcctattgagaaaacaatatccaaggcgaaaggccagccccgtgaaccacaagtatacactcttccgccatctcgagatgagctgacgaaaaaccaggtgtccttaacatgtctggtgaaaggtttctatccctccgatattgccgtcgaatgggagtctaacgggcagcccgagaataactataaaacaaccccgcccgttctggatagtgatggctccttttttctgtatagtaagctgaccgttgacaaatcaaggtggcagcagggcaacgttttctcttgctctgtcatgcatgaagccctgcacaatcattacacgcaaaagagcctaagcctgtcacccgga

SEQ ID NO: 15948 - DNA, 1419 bp, synthetic construct
  misc_feature 1..1419: note = source = /note="Description of Artificial Sequence: Synthetic coding sequence"
  source 1..1419: mol_type = other DNA
atggcggtcatggcccccaggacactcgtgttacttttaagtggggctctcgcgctaacacagacatgggctgaagtgcagctggttgagtctggaggaggattggtgcagcctggagggtcattgcggctgagttgcgcagcatccgggtttaacataaaagatacatacatccattgggtgagacaggccccagggaaaggactagaatgggttgccaggatctatccaactaatgggtatacacgctacgctgactctgtgaaaggaaggttcacaatttccgccgatacaagtaagaacacagcctacctccagatgaattccctgagagctgaggatactgctgtgtattattgtagtcggtgggggggggatggattctatgccatggattattgggggcagggaactttggttacagtttcttccgcctccacaaaagggccaagtgtgtttcccttggcgccctccagtaagagtacttctggagggacagccgctcttggatgtttggtcaaggattattttcctgaacccgtaacagtatcttggaatagtggggcacttacttcaggggtacatacattccccgctgtgcttcaatccagtggactctactccctctcatcagtggttactgtgcctagtagttctctcggaactcagacttacatttgtaacgttaaccataagccaagtaacacaaaagttgataagaaagtcgagccaaagtcttgcgacaaaacacacacttgtcccccatgcccagcccccgaactcttaggaggaccctctgtgttcctgttccctcctaaacctaaagatacattgatgatatctagaacacctgaagtcacttgtgtagtagtggatgtgagtcatgaagatcctgaagtcaaatttaactggtacgtagatggggtggaagtgcataatgctaaaactaaaccacgggaagaacagtacaattctacataccgggtggttagtgtgcttacagttcttcatcaagactggctaaatgggaaggagtataagtgcaaagtcagtaataaagccctccctgctccaatcgaaaaaacaatctctaaagccaaagggcagcctagggaaccccaggtctatactctcccaccatcacgcgatgagcttacaaaaaatcaggtgtccctaacttgtctggtcaagggattttacccttccgatatcgccgtggagtgggaatccaacggacagccagagaataactataaaactacacccccagttctcgactcggatgggtcctttttcttgtattctaagctgacagtagataaatctaggtggcagcagggaaacgtgttcagttgcagtgtgatgcacgaagcactccataaccattacactcagaaatctctttcgctctcgcccgga

SEQ ID NO: 15949 - DNA, 1419 bp, synthetic construct
  misc_feature 1..1419: note = source = /note="Description of Artificial Sequence: Synthetic coding sequence"
  source 1..1419: mol_type = other DNA
atggcggtcatggccccaagaaccctggtgctgctactaagcggtgcattggcacttactcagacctgggctgaagtgcagctcgtggaatccggaggagggcttgtccagcctggaggatctctgagactgagctgcgcagcctctggcttcaatatcaaggacacatacatccactgggtacggcaggcccctggaaagggactggagtgggtagctaggatctatcctacgaatggatacacgagatacgccgatagtgtcaaggggaggttcacgatcagtgccgatactagcaaaaacaccgcatacctccagatgaactccctccgggccgaggataccgcagtctactactgcagtcgctggggcggggatggcttctacgcgatggattactgggggcagggcacactggtgacagtctccagcgccagcactaagggaccaagtgtgttccctctggctccttcctctaagagcacttccggcggaacagcggctctaggctgtctagtgaaggactattttccagagcctgtcacagtgagctggaactcaggggcacttaccagcggagttcatacattcccggccgtgctccagtcctcagggctgtactcgctctcttctgtagtgaccgttccttcctcatccctcggcacccagacttacatatgtaatgtgaatcataaaccctccaacacaaaagtggacaagaaagtggaaccaaaatcgtgcgataaaacacatacatgccccccttgtccggcgccggagcttttagggggcccctcggtgttcctctttcccccgaaaccaaaggatacactgatgataagccgcacacccgaagtgacctgcgtggtggttgatgtcagccacgaagaccccgaggtgaagtttaattggtatgtggatggcgtggaggtacacaatgcgaagactaagccacgggaggagcagtacaattctacataccgtgtggtttcagtcctgacagtgttacatcaggactggttaaacgggaaagagtacaagtgtaaggtttccaataaggctctacccgcgcctattgaaaagacgatcagcaaggccaaaggacagccaagagagccccaagtctatactttgcctccaagccgcgacgagctgactaaaaatcaagttagcctcacgtgcctggttaaaggattctatccttctgatatcgccgtcgagtgggaatctaatggacagcctgagaacaattacaagacaacaccacctgtactggatagcgacggcagttttttcttgtacagtaaacttactgtggataagagcaggtggcagcagggcaatgtgttttcctgtagcgtcatgcatgaagctcttcacaaccattacacacagaaatcgctctcactgtcacccggg

SEQ ID NO: 15950 - DNA, 1419 bp, synthetic construct
  misc_feature 1..1419: note = source = /note="Description of Artificial Sequence: Synthetic coding sequence"
  source 1..1419: mol_type = other DNA
atggctgtgatggcaccgaggacactggtgctcctgctttctggcgcactagctctaacgcagacatgggccgaagtccagcttgtcgagtccggaggtggactggttcaacctggcggcagcttgcggctatcctgtgcagcatctggatttaacatcaaggatacctacatccattgggttcgtcaagccccgggtaagggtcttgagtgggtggcacgcatctatccgaccaacggctatacacgttacgccgatagcgtaaaggggcgtttcaccatcagtgcggatacaagtaagaataccgcctacctgcagatgaacagtctgcgcgcggaggacaccgctgtctactactgttcgcgctggggtggggatggattctacgccatggactactggggacagggaactctggtgactgtttcgtccgccagcaccaagggtcccagcgtcttcccgctcgctccctcctccaagtctacctccggcggtacggcggctctcggctgcttagtcaaggattacttccctgagccggttaccgtgtcgtggaatagcggcgcgctgacctcaggtgtccacaccttccccgcagtgcttcaatcctccggactgtactccctgtcctccgtggtcacagtgccctcctcgagcctaggcacacagacctatatttgcaacgtcaaccacaagccgtccaataccaaggttgacaagaaggtggagccaaaaagctgtgataagactcacacatgccctccctgccccgcacccgagctgctgggtggaccctccgttttcctctttcccccaaaacctaaggataccctgatgatctcgcggaccccggaggtgacatgtgtagtggttgacgtttcgcacgaggaccccgaggtgaagtttaattggtacgtcgacggtgtcgaagtgcacaatgctaagaccaagccgcgcgaggagcaatacaactccacttaccgagtagtcagcgttctcacggtcctgcaccaggactggttgaatggcaaggagtacaagtgcaaagttagtaataaggcgctcccggcgcctatcgaaaagacgatttcgaaggccaagggtcaaccgcgagaacctcaagtctacactctgccaccgtcgcgggatgagctcaccaagaaccaagtaagtctcacctgtctagttaagggtttctatccctcggacatcgctgtggagtgggagagcaatggtcagcccgagaacaactataagacaactccgccggtcttggattcagacgggagttttttcctctattccaagttgacggttgataagtcccgatggcaacaaggaaacgtcttctcctgtagtgtgatgcacgaggccctccacaaccactacactcagaagtccctgtccttgagccctggg

SEQ ID NO: 15951 - DNA, 1419 bp, synthetic construct
  misc_feature 1..1419: note = source = /note="Description of Artificial Sequence: Synthetic coding sequence"
  source 1..1419: mol_type = other DNA
atggcggtcatggcaccacgtacactggtactgctccttagtggggctctcgcgctgacccagacctgggcagaggtgcagctggtggaatccggtggaggactggtgcagcctggcgggtctttacgattgtcctgcgctgccagcgggtttaatatcaaggacacatatatccactgggtgagacaagcccccggtaagggactcgaatgggttgctagaatttatccaaccaacggatacacccgatatgccgattctgtcaagggtagatttaccatttccgcagatacgagtaagaacacggcttacctgcagatgaactccctaagagccgaggatactgcagtgtattactgtagccgatggggcggggatggattttatgcaatggactattgggggcaggggacgctggtgactgtgagcagcgcatcgacgaaggggccatcggtattccccctcgccccctcaagcaaatcaaccagtggcggcactgccgcactggggtgcttagtgaaagattattttcccgagcccgtcacagtctcctggaacagtggggccttgaccagcggcgtgcacactttcccagcagtcctacagagctccggactgtacagtctgagtagcgttgttacagtgccttctagctcactagggacacagacctacatctgtaatgttaatcacaaaccatctaatacaaaggtggataagaaagttgaacctaagtcttgcgacaaaacacacacctgccccccatgtccagcaccagaactgttgggagggccaagcgtgttcctctttccccccaagcccaaggataccctgatgatcagccgaactcccgaggtaacttgcgtggtggtggatgtgtcccatgaagatccagaagtgaagtttaactggtatgtggacggcgttgaggtccacaacgctaagaccaaaccccgagaagaacagtataactcaacttaccgagtcgttagcgtattgaccgtcctccatcaggactggcttaacggtaaggaatataagtgcaaggtttctaataaagcccttcccgcacctatagaaaaaacaatctccaaggccaaggggcagcccagagaaccacaggtgtacacgcttcctccgtcaagggacgagcttaccaagaatcaggtttcgctgacgtgtctggtgaaaggcttttatcctagcgacattgcggttgaatgggagtcaaatggacagcccgagaataactacaagaccacccccccggtacttgattctgatggttcatttttcttatactctaagttaacagttgacaaatccaggtggcaacagggcaatgtgttctcttgttctgtcatgcatgaagctcttcataaccactatactcagaaatcgctttcattgtcaccaggc

SEQ ID NO: 15952 - DNA, 1419 bp, synthetic construct
  misc_feature 1..1419: note = source = /note="Description of Artificial Sequence: Synthetic coding sequence"
  source 1..1419: mol_type = other DNA
atggccgtgatggcaccaagaaccctggtgctgcttctctccggagccctggcactgacccagacctgggcagaggtgcagctggtggagagcggcggtggtctggtgcaaccaggtggaagcctgcggctttcgtgcgcagccagcggttttaacattaaagatacttacattcattgggttcggcaagcacccggaaagggactggaatgggtcgcacgcatttatccaaccaacggttacaccagatacgcggactccgtcaaagggcggtttactattagcgcagacacttcaaagaataccgcgtaccttcagatgaactcactccgagcagaagatactgctgtgtactattgtagccgatggggaggagatggattctacgcaatggattattggggccaaggtactcttgtcactgtctcgtcggctagcaccaagggaccttcagttttccctctggcaccttcgtcaaaatcaacctcgggtggtactgcggcacttgggtgtctggtgaaggactactttccagaacccgtgaccgtgtcatggaattccggagcacttacgtcaggcgtgcacacgttccctgcagtgctgcagtcgtcggggctttacagcctgtctagtgtggtgactgtccctagcagctccctgggtacccaaacgtacatttgcaacgtgaatcataagccatccaatacgaaagtggataagaaggtggaacctaaatcgtgtgataagacgcatacctgtcctccttgtcctgcgcccgaactgctcggcggtccctcggtgtttctgtttccgcccaaacccaaggatactctgatgatatcgcgcacccccgaggtgacttgtgtggtggtggatgtgtcacatgaggaccctgaggtgaagtttaactggtacgtggacggtgtggaggtccataacgctaagaccaagcctcgcgaagagcagtacaattcgacttaccgggtcgtatccgtgttgactgtacttcatcaagattggctgaacggaaaagaatacaagtgcaaggtgtcaaacaaggcacttccagctccaatcgaaaaaactatctcaaaggcaaagggacaaccaagagaaccccaggtgtacactctgcccccatcgagagacgagctgaccaaaaatcaggtttccctgacctgcttggtgaaaggtttttacccttcagatatcgcagtggaatgggaaagcaacggccagcctgaaaacaactacaagaccacccctcctgtccttgattcggacggatccttttttctttactcgaagctcactgtcgacaagagtcggtggcagcaaggaaatgtgttttcctgttcagtgatgcatgaagcacttcacaatcactacactcagaagagcctgtctctgagccccggt

SEQ ID NO: 15953 - DNA, 1419 bp, synthetic construct
  misc_feature 1..1419: note = source = /note="Description of Artificial Sequence: Synthetic coding sequence"
  source 1..1419: mol_type = other DNA
atggcagtgatggctcccagaacactcgtgctcttgctctccggtgccctagccttgacccagacttgggctgaggttcagttggttgagtcaggcggaggtctggtgcagcccggtggatccttgaggcttagctgcgccgcaagtggcttcaatataaaggacacgtatattcactgggttcgtcaggctcctggcaagggtctggagtgggttgcaagaatttacccaacaaatggctatactcggtacgcagactccgtgaaaggacgcttcactatcagcgccgatacaagcaagaatacagcctacctccagatgaattctctgagagctgaagacacagctgtctattattgctctagatggggcggcgacggcttctacgctatggattattggggacaggggacgctggtgacagtctccagcgcatcgactaaggggccttcagtatttcccctggccccctcctcgaagtcgacttccggtgggacagccgcgctcggctgcctcgtgaaagactactttccagagcccgtgactgttagttggaatagtggcgcattaacatcaggtgtccatacctttcctgcggtgctccagtcaagtggcttatatagccttagctctgtagttaccgttcctagcagttccctcggtacccagacatatatatgtaacgtgaaccacaagccctcaaatacaaaggtggacaaaaaagtagaacctaaaagctgcgataagacccatacttgccctccttgcccagctcccgagctgctgggaggtccaagcgtctttcttttcccgccaaagcccaaagatactctcatgatatcccgcacccctgaggttacatgtgttgtggtggatgtatcacatgaggaccctgaagtgaagttcaactggtatgtggatggtgtcgaagtgcacaacgccaagactaaacctcgcgaggaacagtataatagtacctacagagtcgtcagcgtccttaccgtgctgcatcaggattggcttaacggtaaagagtataaatgtaaggtgtcgaacaaggcgctaccagctccaattgaaaagaccatatctaaagcaaaagggcagcctcgggagccccaggtctacaccctgcccccgagtcgcgatgagttgacaaaaaaccaagtgtcgcttacctgcctagtgaagggtttttatccatccgacattgctgtggagtgggagagcaatggacagcccgagaacaattacaagactacaccgccagtgcttgacagcgacggcagcttcttcctgtactcaaagttgactgtggacaaatcaaggtggcaacaaggaaatgtctttagctgcagcgtgatgcacgaagcactgcacaatcactacacccagaagagcctctcgctgtccccggga

SEQ ID NO: 15954 - DNA, 1419 bp, synthetic construct
  misc_feature 1..1419: note = source = /note="Description of Artificial Sequence: Synthetic coding sequence"
  source 1..1419: mol_type = other DNA
atggccgtcatggctccccgcacactggtgcttctgctgtcgggagcccttgcattgacacagacgtgggccgaggtacagctggtggaaagcggaggcggcctggttcagcccggaggaagcctcagactgagctgcgcagctagcggatttaacataaaagacacctacattcattgggttaggcaggccccaggaaagggattggaatgggtggcccggatctacccaaccaatggctataccagatacgccgactctgtcaaaggacggttcacaattagcgctgacacatccaaaaacaccgcatacttgcagatgaactcgctcagggccgaagataccgcagtgtactattgctcaagatggggcggagatggattctatgctatggattattgggggcaaggaaccctggtaacagtgagttccgctagcacgaagggaccgtcagtctttcctctggcacctagctctaaaagcacttctggtggcaccgctgcgctgggctgccttgtgaaagactacttccctgagcccgtgaccgtgtcgtggaactctggcgctctgaccagcggtgttcatacctttcctgcagttctgcagagctctggactctacagcttgagttctgtggtgaccgtgcccagctcttccttgggtacgcagacctatatttgcaatgtgaaccacaaaccctctaacactaaagtcgacaagaaagtcgaacctaagtcatgcgataagacacacacttgtccaccttgccccgctcccgaacttctcggcgggccaagtgtctttctctttcctccgaagccaaaagacaccctcatgatttctcgtactccagaggtcacatgcgtggtggtcgacgtaagtcacgaggatcccgaggtgaaattcaactggtacgtcgacggcgtagaggtgcacaacgctaaaactaagccccgtgaggagcagtataactctacataccgcgtggtctccgtcctgactgtcctgcatcaagactggttgaatggcaaggagtacaaatgtaaggtgtctaacaaggctctccccgctcccattgagaagaccatttctaaagccaagggtcagccacgcgagcctcaggtttacaccctgcccccaagtagggatgaactgactaaaaatcaagtttctttgacctgcctcgtcaaaggcttctacccatcagacatcgcagtggagtgggaatccaatgggcaacctgagaacaattataagacaacacccccggttctggactcagatggaagcttctttttgtattcaaaattgactgtggacaagagcaggtggcaacagggtaacgtcttttcttgcagtgtcatgcatgaggccctgcataatcattacacacagaagtccttgtcactctccccaggg

SEQ ID NO: 15955 - DNA, 1419 bp, synthetic construct
  misc_feature 1..1419: note = source = /note="Description of Artificial Sequence: Synthetic coding sequence"
  source 1..1419: mol_type = other DNA
atggcggtgatggcaccgagaactcttgtcctgctgctgtccggagctctcgcactgacgcagacctgggcagaagtccaacttgtggaatccggaggcggccttgtccaaccaggggggtcccttcggctgtcctgcgcagcatccggatttaacattaaggatacctacatccactgggtgcgccaagctcccggtaagggcttggaatgggtcgcaagaatctaccctaccaatggttacacccggtacgctgattccgtgaaggggaggtttactatttcagcagatactagcaagaacactgcctacctccagatgaattcactgagggcagaggatactgcagtgtactattgttcgaggtggggtggagatggtttctacgcgatggactattggggacagggaaccctcgtgacggtgtcatccgcctcgaccaaagggccctccgtctttccactcgcaccttcctctaaatcgacttcaggcggcaccgccgctctgggatgcttggtcaaagactactttccggaacccgtgactgtgtcgtggaactccggcgccctgacctccggcgtccacacgttccctgcagtgcttcagagctccggtctttacagcctctcaagcgtggtcaccgttccaagctcctccctgggcacccagacctacatatgcaacgtgaaccataaaccttcaaacactaaagttgataagaaagtggaacctaaatcgtgtgacaagacccatacctgtccgccttgtccagcaccagaacttcttggtggcccatccgtgtttttgttccctcctaaacccaaagacaccctgatgatctcgaggactcccgaggtgacttgtgtggtcgtcgatgtgtcgcatgaagatcccgaagtgaagtttaactggtatgtcgacggagtggaagtgcataatgccaagaccaagcctagagaagagcagtataacagcacctaccgggtggtgtcggtccttaccgtgctgcatcaggattggctgaatgggaaagagtacaagtgtaaggtgtctaacaaggcgctccctgcaccaattgaaaagactatttcgaaggcaaagggacaaccacgcgaacctcaagtgtacaccttgccaccctcgagggatgaactcactaagaatcaggtgtccctgacttgtcttgtgaaggggttttacccttcggacattgcagtggagtgggagagcaatgggcaaccagagaataactataagactaccccacctgtgctcgattctgacggttcgtttttcctctacagcaaacttactgtcgataagtcccggtggcagcaaggaaacgtgttcagctgttcggtgatgcacgaagcactccacaaccattacacccagaagagcctctccctgtcacctggt

SEQ ID NO: 15956 - DNA, 1419 bp, synthetic construct
  misc_feature 1..1419: note = source = /note="Description of Artificial Sequence: Synthetic coding sequence"
  source 1..1419: mol_type = other DNA
atggccgtcatggcccctcgcacgctggtgctgctgttgtcaggggcgctggcgctgactcagacttgggccgaagttcagctcgtcgagtcgggcggaggacttgttcagccaggagggtcgcttaggctttcctgcgctgcttcgggcttcaacattaaggacacgtacatacattgggtgagacaagcaccaggtaagggcctggagtgggtggccagaatctaccctactaatggatacactcgatacgccgatagcgtcaagggacgcttcaccatctcagccgacacttcgaagaataccgcatatctgcagatgaatagcttgagagctgaggacacggcggtctactactgctcacgatggggaggagacggattttacgcgatggactactggggccaagggacgctggtcaccgtctcctccgcctcaaccaagggaccgtcggtgttcccactcgcaccgagctcaaagtcgacttccggaggcaccgcggccctggggtgtctcgtcaaggactacttcccggaaccggtcactgtttcatggaactcaggagcccttacgtcgggcgtgcatacttttcccgcggtgctgcaaagctcgggactttactccctgtcgtcggtggtgacggtgccttcctcttcgctcggaactcagacctacatctgtaacgtgaaccacaagccgagcaacaccaaagtggataagaaggtggaacctaaatcttgtgacaaaactcatacttgcccaccatgcccggcaccggagctcctcggcggcccgtcggtgtttctgttcccgcctaaaccaaaggacactctgatgatctccagaacccccgaagtgacctgcgtggtcgtggacgtttcccatgaggacccggaggtgaaattcaactggtatgttgatggagtggaagtgcacaacgctaagaccaagccgcgggaagagcaatacaactcaacttatcgcgtggtgtcagtgctgactgtcttgcaccaggattggctgaatggtaaggaatacaagtgcaaggtgtccaacaaggctttgcctgccccaatcgaaaaaaccatcagcaaggccaagggtcaaccccgcgaaccgcaagtctacaccctgcctccgagcagagacgaactgaccaagaatcaagtctcactcacttgcctggtgaagggcttctacccctccgatattgcggtggaatgggagtccaatggccagccggagaacaactacaagaccaccccgccagtgctggactcggatggatcgttcttcctgtactccaaacttactgtggacaagtcccgctggcagcaaggaaacgttttctcgtgttcggtgatgcacgaggcgcttcacaaccactacacccagaaatctctgtccctgagcccagga

SEQ ID NO: 15957 - DNA, 1419 bp, synthetic construct
  misc_feature 1..1419: note = source = /note="Description of Artificial Sequence: Synthetic coding sequence"
  source 1..1419: mol_type = other DNA
atggctgtgatggctccacgaacactggtgctcctactttccggtgccctggccctgacccagacctgggcagaagtccagcttgtagaatccgggggcgggctggtgcagcccggcggcagcttgaggttgtcttgtgcggcctctggcttcaacataaaagacacttacattcactgggtgcgccaggctcccggcaaaggactcgagtgggttgcccgcatctatccaacgaacggctacactcgttatgccgattcagtgaaaggacgttttacaatttctgccgatacaagtaaaaacacagcttatctgcagatgaacagtttgcgcgctgaggatacagccgtgtattactgcagtaggtggggaggcgacgggttttatgccatggactactgggggcaagggacactggtgactgtctcgtcggcctccacaaaaggaccctctgtgtttcctctggcgccaagctctaagtcaaccagtgggggcacggctgctctgggctgtctggtgaaggattatttcccagagcctgtgactgtcagttggaattccggagcgcttacaagtggcgtgcacacatttcccgcagttctacagagttcaggactttactcgctgagcagcgtggtgactgtcccctccagtagtcttggaacccagacatatatttgcaatgtgaatcataaaccatctaacaccaaggtagacaaaaaagtcgagccaaagtcatgcgacaagactcacacctgcccgccttgccctgcccccgagctgctcggaggtcccagtgtatttctgtttccccctaagcctaaggatactctgatgatctcccggacaccggaggtcacctgcgtagtcgtggacgtctcccacgaggaccccgaagtgaagtttaactggtacgtagatggagtggaggttcataacgcgaagacaaagccaagagaggagcagtataattccacttatagagtggtatccgtgctgactgtgcttcatcaagactggctgaacggaaaagaatataagtgtaaggtgtcaaataaggccctgcccgcgcccatcgagaagactatatccaaggccaaaggacagcccagagaaccacaggtttacaccctgcccccttccagagatgagctgactaagaaccaagtctcgctgacttgtttggtgaaagggttttatcctagtgacatcgccgtggagtgggagtccaacggccagcctgagaacaattataaaactacacctcctgtgctggactccgacgggtcttttttcctttacagcaagctaaccgtcgacaagagtaggtggcagcagggaaacgtgttttcatgctccgtgatgcatgaggcactccacaaccactatactcagaagtctctgtccctctcacccggt

SEQ ID NO: 15958 - DNA, 1419 bp, synthetic construct
  misc_feature 1..1419: note = source = /note="Description of Artificial Sequence: Synthetic coding sequence"
  source 1..1419: mol_type = other DNA
atggctgtgatggcaccccgaaccctggtactcttactgtctggggccttagcattgacgcagacatgggccgaggtgcagctggtggagtctggaggaggcctcgtacaaccggggggatcactccgattaagctgtgcggccagtggattcaacattaaggatacctacatccattgggtccgccaggcccctggaaagggcctcgaatgggtcgccagaatctatcctacgaatggatatacaaggtacgccgacagcgtgaagggtcgctttactatcagtgccgacactagtaagaataccgcctatctgcaaatgaacagccttagagcagaagataccgcagtgtactactgtagccgttggggcggtgatgggttttatgccatggactattggggccaagggacactggtcactgtgagctccgccagcacgaagggtccttccgtatttcctctagcaccatcctcaaagtcaacaagcggaggcaccgctgcactgggctgcctggtgaaggactacttcccagaacccgttacagtgagttggaattcaggcgcgctgacgagcggggtacatacatttcccgccgtgttgcagtcatccggtctttacagcctatcctcagtggtcacagtgccttctagctctctgggcacccaaacttatatctgcaacgtgaatcacaagcctagtaatactaaagttgacaaaaaagtggaaccgaaaagttgtgacaagacgcacacctgtccaccttgtccagcacccgagctgctcggggggccttccgtcttcttgttcccccctaaacccaaagacacactcatgatcagcagaactcctgaagtgacctgtgtagtggtagacgtttctcatgaagatccagaggtgaagttcaattggtacgtggatggcgtggaggtgcacaatgcgaagactaagcctcgcgaggaacagtataactccacgtacagagtggtctctgtcctgaccgtgctacatcaggactggctgaatgggaaggaatataaatgtaaggtgtctaataaggcattgcctgctcccattgagaagactatttcaaaagcgaaggggcagccacgcgaaccccaggtatacacattaccaccttcacgtgacgagttgacaaagaaccaggtcagtctcacatgcctggttaagggcttctatccatctgatatcgccgtggagtgggaatctaatggccagcccgaaaataattacaagacaacacccccagtcctggattcagacggctcattcttcctgtacagcaagctgacagtagacaaatcccggtggcaacagggcaacgtgtttagctgctctgtgatgcacgaggcccttcacaaccattatacccagaagagcctcagtttatcaccaggt

SEQ ID NO: 15959 - DNA, 1419 bp, synthetic construct
  misc_feature 1..1419: note = source = /note="Description of Artificial Sequence: Synthetic coding sequence"
  source 1..1419: mol_type = other DNA
atggcagtgatggcgcctcggactctcgtccttctgttgtcgggtgcactggcgcttactcaaacttgggcagaagtccaactcgtggaatcgggagggggtcttgtgcaaccaggtggttctctgcgtctgtcgtgtgctgcgtcagggttcaacatcaaggatacctacatccattgggtaaggcaagccccaggcaagggcttggagtgggtggctagaatttaccccaccaacggatacacgaggtacgcagattccgtgaagggtcgattcaccatcagcgcagacaccagcaagaacactgcttaccttcaaatgaattccctcagagcagaagatactgccgtgtactattgctcccgttggggcggagacggtttttacgcaatggactactggggacagggaactttggttactgtgtcctcagcatcgaccaaaggaccatccgtgtttccacttgcaccgtcatccaaatccacctcaggcgggactgccgcactcggatgcttggttaaagattactttcctgaaccagtcacggtgtcctggaattccggagcacttacctcgggggtccatacgtttcctgcagttctgcaaagctctggactctattcgctgtccagtgtggttacggtgccatcgtcgagcctgggaacccagacttacatttgtaatgtgaaccataagcctagtaatactaaggtggacaagaaagtggagccaaaatcctgtgataagacccacacctgccctccttgtcccgcaccagagctgcttgggggaccaagcgttttcctctttcctccaaagcctaaggatactctgatgatttcccggactcccgaggttacttgcgtggtagtggatgtgtcacacgaggacccagaagtcaagtttaactggtacgtggatggcgtggaagtgcataatgcaaagactaagccacgtgaagaacaatacaactcaacgtaccgggtcgtgtcggtgcttaccgttctgcaccaggattggcttaacggaaaggaatacaagtgtaaggtcagtaacaaggcactccccgcaccaattgagaaaaccatctcgaaagcaaagggacagccccgagaaccccaggtgtatacccttcctccctccagagacgaactgactaagaaccaagtgagcctgacctgtcttgtgaagggtttttacccgagcgatatagctgtcgaatgggagtcgaatggccaacctgaaaacaattacaaaaccactcctcctgtcctggattctgatggctcatttttcctttactcaaaacttactgtcgacaagtcgcggtggcagcagggtaatgtgttctcgtgttccgtcatgcatgaggcactccataaccactacactcagaagtcactttcactgtccccaggt

SEQ ID NO: 15960 - DNA, 1419 bp, synthetic construct
  misc_feature 1..1419: note = source = /note="Description of Artificial Sequence: Synthetic coding sequence"
  source 1..1419: mol_type = other DNA
atggccgtcatggcgccaagaacacttgttctcctgctgtcaggggccctggctctgacccaaacctgggctgaagtgcagctcgtggagagtgggggaggactcgtgcagccaggaggatccctgcgcttatcgtgtgccgccagcgggttcaacatcaaggacacatatatacactgggtccgtcaggccccgggcaaggggctggagtgggtggcccgcatatatccgaccaacggatatacccgctacgccgatagcgttaaagggcgttttacaatttcagccgatacttccaaaaacacagcctacctgcagatgaactctctgcgagccgaagacacagcagtctactactgttctcggtgggggggggatggcttctacgccatggattattgggggcaggggacactcgtgaccgttagttctgccagtacaaaaggaccttcggttttccctctcgcgccctcctctaaaagcacaagcggtggcacggccgcccttggctgtttggtgaaagactattttccagagccagtaactgtttcctggaactccggagctctcacaagtggcgttcacacctttccagctgtgctacagtcgagtggactgtattccctgtccagcgtggttaccgtgccatcctcttccctaggcactcagacctatatctgcaatgtaaaccacaagccatctaacactaaagtggataaaaaagtggagccaaaaagctgtgataagacccacacgtgtccgccgtgtcctgccccagaactccttggaggacccagtgtctttctgtttccccccaagcccaaggacacgctgatgatctcgagaacacctgaggtaacttgtgtggtcgtggatgttagtcacgaggaccctgaggtaaagttcaattggtacgtggacggcgtagaagtgcacaacgctaagacaaagccgcgagaggaacagtataatagtacctaccgggtggtgagcgtgctgacggtgctgcatcaggattggcttaacggtaaagagtataaatgtaaagtgtccaacaaagctctccccgctcccatcgagaagaccataagcaaggctaaggggcaacctcgtgagcctcaggtgtatacgctgccaccctccagggatgagctaactaaaaatcaggtttcgcttacctgcctagtgaaaggattttacccttcggatattgcggttgagtgggagtcaaacggacagcccgagaacaattataaaactacccctcctgtcctcgattcagatgggtcattttttttgtatagtaagcttaccgttgataaatcgaggtggcagcagggcaatgtgtttagttgtagtgttatgcacgaagccctgcacaaccattacacccagaagagtctatccctctcacctgga

SEQ ID NO: 15961 - DNA, 1419 bp, synthetic construct
  misc_feature 1..1419: note = source = /note="Description of Artificial Sequence: Synthetic coding sequence"
  source 1..1419: mol_type = other DNA
atggccgtcatggcccctagaacattggtcctgctactctcgggcgcccttgccctcacacagacctgggctgaagtgcaactcgtggagagcggcggggggttggtacagccaggcgggagtttgcgactttcttgcgctgcttctgggttcaacatcaaagacacatatatccactgggtgcgtcaagctcctgggaagggacttgagtgggtagctcgcatctacccaacaaacggctacactaggtacgcggactcagttaaaggtcggtttaccataagtgctgataccagtaagaacaccgcttacttgcaaatgaatagcttgcgggctgaggataccgcagtgtactattgcagccgctggggaggggacggattctatgctatggattattggggacagggaacactagtgacggtaagctccgccagcacaaaagggccttccgtcttccccctggccccatctagcaagtctacctcaggtggcaccgccgcattgggttgtttggtcaaggactatttccctgaacccgtcaccgtcagctggaactctggtgcccttactagcggagtccacaccttcccagccgtcctgcagagctccggcctgtattctctgtcgtctgtggtgacagtacccagttctagcctggggacacagacttacatttgtaacgtgaaccataagcctagtaatacaaaggtggataagaaagtcgagccaaaaagttgtgataagacccacacatgtcccccctgtcctgcaccggagcttcttggcggaccttctgtattcctcttcccacctaagccaaaggacacactgatgataagccgtacgcccgaggtcacttgtgtggttgtggacgtcagccatgaggatcctgaggttaagttcaattggtacgtcgacggcgttgaagttcacaacgcaaaaaccaaaccaagagaggaacagtataactcaacatacagggtcgtttcggttctcactgtacttcaccaggattggcttaacggcaaagaatataagtgcaaggtgtcaaataaggcactgcccgccccaatcgaaaagactattagtaaagcaaaggggcagccgcgcgagccacaggtttataccctccctcctagtagagatgagctgaccaagaaccaggtcagccttacttgcttggtaaagggcttttatccctctgacattgcagttgaatgggagagcaacgggcagcccgaaaacaactataagactacaccccccgtactcgattctgatggcagtttttttctgtactctaagctaacggtggataagagcaggtggcaacaaggtaatgtattctcctgctctgttatgcatgaggccctccataatcactatactcagaagagcctttccttgagcccaggc

SEQ ID NO: 15962 - DNA, 1419 bp, synthetic construct
  misc_feature 1..1419: note = source = /note="Description of Artificial Sequence: Synthetic coding sequence"
  source 1..1419: mol_type = other DNA
atggccgtcatggcaccgcgcactctggtgttgctcctctccggggccctggcattgacccagacctgggccgaagtgcaactcgtggagtctggaggagggctggtgcagcctggaggttcactgcggctttcttgtgccgcttcgggatttaacatcaaagacacctacatccattgggtgcgccaggcaccagggaagggactggagtgggtggcccgcatataccccacgaatggatacacccgctatgcggactcggtgaaagggagattcaccatctcggccgatacttcgaagaacacggcctacttgcagatgaactcgctcagagcagaggacacggcagtctactactgctcacggtggggaggagacggattctacgctatggattactggggacaaggaactctggtgactgtgtcgtcggcttccaccaagggtccttctgtgttcccactggctccgtcgtcaaaatcgacttcaggaggtactgcggccttgggatgcctggtgaaagactacttcccggagcctgtcaccgtgtcatggaactcaggggccctgacttccggcgtgcacacttttccggctgtcctccagagctcgggactgtacagcctgtcgagcgtggtcaccgtgcccagctcctcactcggcacccagacctatatctgcaacgtcaatcacaaaccatccaacactaaggtcgacaaaaaggtggagcctaagtcgtgcgataagactcacacctgtcccccctgcccggccccggaactgctcggaggcccgtcagtctttttgtttccaccaaagcctaaagacaccctgatgatctccaggactccagaggtgacttgcgttgtggtggatgtctcccatgaggaccctgaagtcaagtttaactggtatgttgatggtgtagaagtccacaacgccaaaactaaaccacgagaagaacagtacaactcaacctaccgtgttgtctccgtgctcactgtcctccatcaggactggctcaacggaaaagagtataagtgcaaggtgagcaataaggccctgcctgcgccgatcgaaaaaactatcagcaaggcaaagggccaaccgagagagccacaagtgtacacccttccaccatcaagagacgaactgaccaagaaccaggtgagcctcacttgtctcgtcaagggcttctaccccagcgatatcgcagtggagtgggaaagcaacggccagcctgagaataactacaaaactacgcctccggtcctggattcagacggatcgttcttcctgtactcaaagctcaccgtcgataaatcgaggtggcagcagggcaacgtgttctcgtgctcagtgatgcacgaggccctgcataaccactacacccagaagagcctttccctgagtccgggg

SEQ ID NO: 15963 - DNA, 1419 bp, synthetic construct
  misc_feature 1..1419: note = source = /note="Description of Artificial Sequence: Synthetic coding sequence"
  source 1..1419: mol_type = other DNA
atggccgtgatggccccgcgcaccctggtcctgctcctctcaggagccctggcactgactcaaacctgggccgaagtgcagctggtcgaaagcggtggcggcctggtgcagcccggaggttccctccggctgtcgtgcgctgcgagcggattcaacattaaagacacgtacattcactgggtgagacaagcccctggaaaaggactggagtgggtggctcggatttacccgaccaatgggtacactagatatgctgattctgtgaagggcagattcaccatctcggctgacacgtcgaagaatactgcctacctgcaaatgaattcactgcgggctgaagatactgcagtgtactactgctcccgctggggaggcgatggattttacgcgatggactattggggacagggaaccctggtgaccgtgagcagcgcgtctaccaagggtccttcagtgttcccgttggccccctcgtcgaagagcacgtctggaggtactgcggcgctgggatgcctggtgaaggactactttccggaaccagtgaccgtgtcatggaattccggtgcgctgacctccggggtgcatactttcccggccgtgctgcaatcaagcggactttactctctttcttcggttgtgactgtcccgagctcgtccctgggaacccagacttacatctgcaacgtgaaccataagcccagcaacactaaggtggacaaaaaggtggaacccaaatcatgcgataagactcatacctgccctccctgtccggcgccagagctgctcggtggaccgagcgtctttctgtttccacctaagcccaaggatactctcatgatctcgaggacccctgaagtgacttgtgtggtggtggacgtatcgcacgaggacccggaagtcaagttcaactggtacgtggatggcgtcgaggtgcataatgccaagaccaagccgcgcgaggaacagtacaactcgacttacagagtggtgtcagtgctgaccgttcttcaccaagactggctgaatggaaaggagtacaagtgcaaggtgtccaacaaggcgctgcctgccccgattgaaaaaaccatctcgaaggccaagggacagccccgggaaccacaagtgtacactctgccaccatcgcgggatgaactgactaagaatcaggtttccctgacttgcctggtcaaaggattctacccgtccgacatcgcagtggagtgggaaagcaacggccagccggagaacaactacaagaccactccaccggttctcgactccgacgggtcgtttttcctgtattcaaagctcaccgtggataagtcgcgctggcagcagggcaatgtgttttcctgttcggtcatgcatgaagccttgcataaccattatacccaaaagtccctctccctttcgccaggc

SEQ ID NO: 15964 - DNA, 1419 bp, synthetic construct
  misc_feature 1..1419: note = source = /note="Description of Artificial Sequence: Synthetic coding sequence"
  source 1..1419: mol_type = other DNA
atggcagtgatggcccctcgtaccctggtacttctcctgtccggcgctcttgccctgacacagacatgggctgaggtgcaattggtggagagtggcggcgggcttgtgcagcctggcggcagtttacgtctctcttgtgcagccagcgggttcaacataaaagacacatatatccactgggtacggcaggcaccgggcaagggcctagaatgggtcgcccgaatctatccgaccaacgggtacacaaggtatgctgatagtgtcaaggggcgctttactatctctgcagacacctctaagaatactgcatacctgcagatgaattcactccgggccgaggacactgcggtgtattactgctcacggtgggggggcgatggcttttatgccatggattactgggggcagggcacactcgtgaccgtttctagcgctagcacaaagggcccatccgtgtttccgctggccccatcgtcaaaatccacgtctgggggcacggccgcactaggctgtttggtgaaggactactttccggaacctgtcaccgttagttggaattcaggagctttaacaagcggagtgcatactttccctgccgtgctgcaatctagtggcctctattctttatccagcgttgtcaccgtgccttctagtagcctggggacacagacatacatttgtaatgtgaaccacaagccgtctaatactaaggttgataaaaaagtggagcccaagtcctgtgacaaaacccatacgtgccctccctgccccgccccagagctgctagggggcccatccgtatttcttttcccccctaagccaaaggataccttgatgatatcgcgaaccccggaagtgacttgcgttgtggttgacgtgagccacgaggacccggaggttaagtttaactggtatgtggacggagtggaagtgcataacgcaaaaacaaagccgcgagaagagcagtataactccacatatcgcgtggtctcagtgcttacagtcctgcaccaagattggctaaacggtaaagagtacaagtgcaaagtcagtaacaaagctctgccagccccgatcgagaaaacaattagtaaggcaaagggtcagccgagagagcctcaggtgtacactctccctccgagccgagatgaactgactaagaaccaagtctctctcacctgtctggttaaaggtttctacccttctgatatagcagtcgagtgggagtcgaatggccagcccgagaacaattacaaaaccacacctccagtgctggattcagatggcagcttctttttgtactcaaaactgactgtggataaaagcaggtggcaacagggcaatgttttcagctgttccgtgatgcacgaggccctccacaatcactatacccagaagagtctgtccttatccccgggc

SEQ ID NO: 15965 - DNA, 1419 bp, synthetic construct
  misc_feature 1..1419: note = source = /note="Description of Artificial Sequence: Synthetic coding sequence"
  source 1..1419: mol_type = other DNA
atggcggtcatggcaccacggaccctagtcttgctcctaagtggggccttagcactgacccagacttgggcagaagttcagttagtcgagtcaggcgggggattggttcagccaggcggcagcctgcgcctttcatgcgccgcctccggcttcaatataaaggacacttatatccactgggtccgtcaggcgccgggcaagggtctggagtgggtggctcgaatatacccgacaaacggctatacccgctacgctgactccgtgaaaggccggttcaccatctcagcggacacgagtaagaatactgcgtacctgcagatgaattccctgagggctgaggacacagctgtgtattattgctccagatggggtggggatggcttttatgcgatggactattggggccagggtacgctggtcaccgtttcttctgcttcaacaaaaggaccaagcgttttcccattggcccccagcagtaagagcacgagcggcggcaccgctgctctgggctgcctggtgaaagactacttcccggagcctgttacagtgtcatggaattccggggcactgacatccggagtccacacctttcccgccgttttgcagagcagtgggctgtacagtctgagtagcgtcgtgacagtgccatctagttctttggggacacaaacctatatctgtaacgtgaaccacaaaccctccaatactaaggtggacaagaaggtggagccaaagagctgtgataagacacacacttgccccccatgcccagcccccgaactgctgggaggaccttcagtgttcctgttccccccgaagccgaaagataccctgatgatctctcgcactccggaggtgacgtgcgttgtagtggatgtaagtcacgaagatccagaggtgaaatttaattggtatgtggatggcgtcgaagtccacaatgcaaagacaaaacctagggaagagcaatataactccacctatcgcgtggtatctgtcctaaccgtgctccatcaggattggctgaacgggaaggaatacaaatgtaaggtttccaacaaggcattacctgctccgatagagaagacgatttcgaaggcaaagggacagccaagggagcctcaggtgtacactcttccgccatcacgggatgagctgactaagaaccaggtgagcctgacttgcctggtgaagggcttttatcccagtgatatcgctgtggaatgggagtctaacggccagccagagaataactacaagaccaccccccctgttcttgattccgatggttccttttttctttatagcaagcttacagtggataaaagcaggtggcagcagggcaatgtgttctcttgttctgtcatgcacgaagctctccataatcattacacgcagaagtctctgagtttgtcgcccggc

SEQ ID NO: 15966 - DNA, 1419 bp, synthetic construct
  misc_feature 1..1419: note = source = /note="Description of Artificial Sequence: Synthetic coding sequence"
  source 1..1419: mol_type = other DNA
atggccgtgatggcgccaagaaccctggtgctgctgctgtcgggggccctggccctgacccagacctgggcagaagtgcaactggtggagagcggaggaggactcgtgcaacccggcggatcactgagattgtcttgtgcagcaagcggattcaacattaaggacacctacatccactgggtcagacaagccccaggcaagggactcgagtgggtggcccggatttacccaactaacggatacactcggtacgccgactcagtgaagggacgcttcaccatctccgccgatacctcaaagaacacggcctacctgcaaatgaactctttgcgggcagaagataccgcggtgtactactgctccaggtggggtggagatggattttacgctatggattactggggacagggtaccttggtcactgtctcgagcgcctcaactaagggcccgtcagtgttccccctcgccccgagctcgaaaagcacctcaggggggactgcagcactgggatgccttgtcaaggactacttccctgaaccggtgactgtgtcgtggaactccggagctctgacctcgggcgtgcatacgttcccggcggtgttgcagagctcggggctttattccttgtccagcgttgtgactgtcccttcctcgagcctcggaacgcagacttacatttgcaacgtgaatcacaagccgagcaataccaaagtggacaagaaggtggagccaaagtcgtgcgataagactcacacctgtcctccgtgcccagccccagagcttctgggaggaccgtccgtgttcctcttcccgcctaagccaaaagacactctgatgatttcgaggactcctgaagtcacttgcgttgttgtggacgtgagccatgaggatccggaagtgaaattcaactggtacgtggatggtgtcgaagtccacaacgccaagactaagccgcgggaggagcagtacaattctacctaccgggtggtgtccgttcttaccgtgctgcatcaagactggttgaacggcaaggaatacaaatgcaaggtgtcaaacaaagccctgccagcacccatcgaaaagaccatctcaaaagcaaaaggacagccacgggagcctcaggtgtataccctcccaccatcacgcgacgagttgactaagaaccaggtgtcgctgacctgcctggtgaagggcttttacccgtcggacatcgcggtggagtgggagagcaacggccagcccgaaaacaattacaagaccactccgcctgtcttggactccgacgggtcgttcttcctgtactcaaaattgacggtcgacaaatcgcggtggcagcaaggaaacgttttttcctgctctgtgatgcatgaggccttgcacaatcactacacccagaaatcgctgtctctctcgcctggt

SEQ ID NO: 15967 - DNA, 1419 bp, synthetic construct
  misc_feature 1..1419: note = source = /note="Description of Artificial Sequence: Synthetic coding sequence"
  source 1..1419: mol_type = other DNA
atggccgtgatggcccctcgaacactcgttctgttactgtccggggccttggccttgactcagacatgggctgaggtccagcttgtggaatccggcggcggccttgtgcagcctggcgggagtttgcggctgtcctgcgccgcctcaggatttaacattaaggatacgtacatccactgggtacggcaagccccaggcaagggccttgaatgggtggcacgcatctacccaaccaatgggtacactaggtacgctgacagtgtgaaggggcgattcacgatcagcgctgacacgtctaaaaatactgcttatttgcagatgaatagcctcagggctgaagacacggccgtctactactgctcacgatggggaggcgatggtttttacgcaatggactactgggggcaggggactcttgtgacagtttccagcgccagcacaaagggccccagcgtttttcccctcgcaccttcgagtaagagcacctctggaggtacagccgctctcgggtgtctcgttaaggattatttccccgagccagttacagtatcttggaacagcggagccctgactagtggcgtgcacacattcccagcggtgctacagtcgagcggcctgtactcattgtcttccgtggtaacggttcccagcagtagcttgggcacgcagacctatatttgcaacgtgaatcataagccctctaacacaaaagtggataagaaggttgagccaaagtcctgcgataagactcatacatgtcccccttgccccgcacccgaactattgggcgggccctccgtgttcctctttccacctaagcccaaggacactctgatgattagccgcacccccgaagtgacttgcgttgtagttgacgtttcgcacgaagatccagaggtgaaatttaactggtacgtggacggcgtcgaggtgcacaacgccaagacgaagccacgcgaagagcagtataactctacctaccgcgtggtgtccgttctcactgtcctgcaccaggattggctaaacgggaaggaatacaagtgtaaagtgtccaacaaagcactaccagccccgattgaaaagaccatctccaaagctaagggtcaaccaagagagccacaggtctatacacttccgccttccagggatgagctgactaagaaccaggtatccctgacttgtctggtcaaaggcttctatccaagcgatattgctgtggaatgggagagcaacgggcaacctgagaacaactacaaaaccactcctccggttctggacagcgatggatcctttttcctttactcaaagctgacagttgacaaatctcggtggcaacagggaaatgtgttttcctgctctgtgatgcacgaggcattgcacaaccattatactcaaaaatcgctctcgctgagccctgga

SEQ ID NO: 15968 - DNA, 1419 bp, synthetic construct
  misc_feature 1..1419: note = source = /note="Description of Artificial Sequence: Synthetic coding sequence"
  source 1..1419: mol_type = other DNA
atggccgtcatggctccgagaacactggtgctcttgttgagtggcgccctggccctgacccagacttgggcagaagtgcagctggtggagagtggcggcgggctagtgcagccaggcgggtccctgcgcctaagctgtgccgccagtggatttaacattaaggatacctatattcattgggtgcgccaggcccccggaaaagggctggaatgggttgctagaatctacccaaccaacggctacacacgatacgctgatagcgtgaagggcagatttaccattagtgcagacacttcaaaaaataccgcctacctgcaaatgaactcactgagagcagaggacacagccgtttactattgtagtagatggggtggcgacgggttttacgccatggattactggggccaaggcaccctcgtgacagtgtccagtgcatcaactaagggacctagtgtgttccccctggcccctagttccaagtccacttctggaggaaccgccgccctgggatgtttggtaaaggattatttccccgagccggtcactgtgtcatggaactctggcgctctgaccagcggcgttcacactttccccgccgtgttacagagtagcggcctgtatagtctgagctcagtggtgaccgtccctagcagctccctcggaacacaaacttacatttgcaacgtgaatcataaacccagcaacaccaaggtagacaaaaaagtggagcccaagtcatgtgataaaacccacacatgtccaccttgcccggcacccgagctgctgggcggtccctccgtgttcctgttcccccccaagcctaaagatactttaatgatttcgcgcacaccagaagtgacgtgcgtcgttgtggatgtgagccatgaggacccggaagtcaagttcaattggtacgtcgacggggtggaggtgcataacgcaaaaactaaacctagggaagagcaatataacagtacgtaccgtgttgtcagtgtcctgacggttctgcaccaggactggcttaacgggaaagaatataagtgcaaagtcagtaacaaggccctgccggcgcctatcgagaagaccatcagcaaagccaaggggcaacctagggagcctcaagtttacacacttccaccttcccgtgatgaactgactaaaaaccaggtaagcctaacatgcctggttaagggcttctaccccagtgacattgccgttgaatgggagtcgaacggtcaaccagagaacaattataagacaacaccaccggtactcgactcagatggtagttttttcctgtatagcaagcttacggtcgataagagtcgctggcaacaggggaatgtttttagttgtagcgttatgcatgaggccctacataatcattacacccaaaaaagcttgtccttatcccccggg

SEQ ID NO: 15969 - DNA, 1419 bp, synthetic construct
  misc_feature 1..1419: note = source = /note="Description of Artificial Sequence: Synthetic coding sequence"
  source 1..1419: mol_type = other DNA
atggccgtcatggctcctcgtacccttgtattgcttctgtccggcgctctggccttgactcaaacatgggcagaagtgcagcttgtggagtctggaggaggtctcgttcaacccggcggctcacttcgtctcagttgcgctgcctctggattcaacattaaggacacatacatccactgggtcagacaagctcctggaaagggactcgaatgggtggctagaatttatccaacaaacggatacactcgttacgccgatagcgtcaagggtaggttcactatcagtgctgacacatctaagaatactgcctacttgcaaatgaacagtctccgtgccgaggacaccgctgtgtactattgcagcagatggggaggagacggattctacgctatggattactggggacagggtaccctggttaccgtgagttcagcctctacaaagggcccctccgtgtttccactggctccaagctcaaagtccacctctggaggcaccgccgctctgggctgcctggtcaaggattactttccagaacctgtgacagtttcctggaattctggagctctcacttcaggcgtgcatacattccctgctgtgttgcaatcctccggcctgtactctttgagctctgtagtgactgtcccttcctcctctctcggtacccaaacatatatctgcaatgtcaatcacaagccaagtaacactaaagtagacaagaaagtggagccaaagtcctgcgataagacacatacctgtccaccctgcccagctcctgaactcctcggaggtccaagcgtgttcctgtttcctcccaaacccaaagatacactcatgatctctaggacacctgaggtgacttgtgtggtagtcgacgtatcccacgaggacccagaggtgaagtttaactggtatgtcgacggcgtcgaggtgcataatgcaaaaacaaagcctcgcgaggagcagtataactccacctacagggtggtgagcgtgctgacagtcttgcatcaagattggctgaacggtaaggaatataagtgcaaggtctcaaacaaggcactgcccgcccccatcgagaagaccatttccaaggccaagggccagccaagagaaccacaagtctacaccctcccaccatctagggacgagctgaccaagaatcaggtttctctgacatgtttggtcaagggtttctacccttctgatatagctgtcgagtgggagtctaacggacaacccgaaaacaactacaaaaccactccacccgtcctcgactccgatggctcattctttctgtactctaaattgaccgtcgataaaagcaggtggcaacagggcaatgtattttcttgtagtgtgatgcacgaggccttgcataaccactacacccaaaaaagtctgagtcttagcccaggt

SEQ ID NO: 15970 - DNA, 1419 bp, synthetic construct
  misc_feature 1..1419: note = source = /note="Description of Artificial Sequence: Synthetic coding sequence"
  source 1..1419: mol_type = other DNA
atggcagtcatggctccaaggaccctagtgttgcttctgtcaggagcattggctctgacccaaacctgggctgaggtgcagctggtggagagtggcggcggtcttgttcagcccggcggaagcctccgtcttagctgcgccgcttctggcttcaacattaaagacacgtatatccattgggttcgccaggcccctggcaagggcctcgaatgggttgcacgaatctatccgactaatgggtataccaggtacgcagattctgtcaaaggcaggttcaccattagcgccgatactagcaaaaacacagcctatttgcaaatgaattccttgagggccgaagacactgccgtttactactgtagcagatggggaggcgatggattttatgcgatggactattgggggcaggggacccttgttaccgtgtcttctgcttcaacaaagggccccagcgttttcccactagccccaagctctaagtctacatctgggggtactgccgccctgggctgtttggtgaaggattactttccagaaccggtaaccgtgtcttggaacagcggcgcgcttacatccggagtacatacttttcccgcagtgttgcagagctccggcctctattctttgtcctctgtggtgactgttccatcatcatccttgggcactcagacctacatatgtaacgtgaatcataagcctagcaacaccaaggtcgacaaaaaagtggagccaaagagctgtgacaagactcatacctgcccaccctgtcctgcacctgagctgctaggagggccgagcgtctttctgttccctcccaaacctaaagatacactgatgatctcacggaccccagaggtgacttgtgtcgtggtggatgtctcccatgaggatccagaagtaaagtttaactggtacgtggatggggtggaagttcataatgccaaaaccaaaccccgggaagagcagtacaatagcacttacagagtggtctccgtgctcaccgtgctccatcaggactggctgaacgggaaagagtataagtgcaaagtatcgaacaaggctctgcccgcccccatagagaaaactattagcaaagcgaaaggacagccacgagagccccaggtgtacacacttcccccctccagagatgaactcacaaagaaccaggtgtctctcacgtgtctagtcaaagggttttatccctccgatatagccgtggagtgggagagtaatgggcaaccagagaacaactacaagacgactccacctgtgttggactcagacggttctttttttttatatagcaagctgacagttgataagtctcggtggcagcagggcaacgtgttcagttgttcagtgatgcatgaagctctccacaatcactacactcagaagagcctatccctgagccccggc

SEQ ID NO: 15971 - DNA, 1419 bp, synthetic construct
  misc_feature 1..1419: note = source = /note="Description of Artificial Sequence: Synthetic coding sequence"
  source 1..1419: mol_type = other DNA
atggccgtcatggccccgcgcactctggtcctcctgctgagcggtgccctggctctgacacagacttgggccgaggtgcagctggtggagtccgggggcgggctcgtccagcctggcggctccctgaggctgtcctgtgctgcctcagggtttaacattaaagacacctatatacattgggtgaggcaggcacctggaaagggcctcgaatgggtcgccaggatctatccaactaatgggtacaccagatacgctgatagcgtgaagggtcggtttactatttctgccgacactagcaagaacaccgcttacttacagatgaactctttgcgggccgaggacactgccgtgtactactgttctagatggggaggggacggcttttacgctatggattactggggccaagggacattagttactgtgtctagcgcttccaccaagggtccttctgtgttcccactggccccctcctcaaagagtacctctggaggcacagccgctctgggatgtctagtgaaagactattttccagaacccgttaccgtctcttggaactccggcgccctgacctccggcgttcacacttttcccgctgtgctgcagtcatccggactctacagcctgtcatccgtagtgactgtacctagcagcagcctggggactcagacctatatttgcaatgtgaatcataaaccatccaacaccaaggtggataaaaaagtggagccaaaatcttgcgacaagacccacacatgccccccatgtcctgctcctgaactgctggggggccctagcgtctttctatttcctcctaaacctaaggacactttgatgattagcagaacaccagaggtgacttgtgtggttgtggacgtatcccacgaggatcctgaagtgaagtttaactggtacgttgatggcgttgaagttcataacgcaaagactaagccaagggaggaacagtataacagcacctaccgggtggtgtcagtcctgacagtgctgcatcaggattggctcaatggaaaggagtacaagtgcaaagtttcaaacaaggccctgccagctcccatagaaaagactatttctaaggctaaagggcagccacgggagccccaggtctatacattacctccttctagggacgaactgaccaagaaccaggtgagcctaacttgcctggtgaaaggcttttatccatctgacatcgctgtggaatgggaatcaaatggtcaacctgagaataattacaaaaccaccccccccgtgctggattctgatggatccttctttctatacagtaagctgactgtcgataagagtaggtggcagcaaggcaacgtgttttcctgctccgtgatgcacgaagccttacacaaccactacacacagaaaagcctgagcctgtcacccggg

SEQ ID NO: 15972 - DNA, 1419 bp, synthetic construct
  misc_feature 1..1419: note = source = /note="Description of Artificial Sequence: Synthetic coding sequence"
  source 1..1419: mol_type = other DNA
atggccgtgatggcccctagaactttggtgttgctgctgtccggagctctggcgttgacccagacatgggcagaggtacagttggtggagagcgggggaggtctggtgcagcctggcggttccctgagactgagctgcgccgccagcggcttcaatatcaaggacacatacatacactgggtgagacaagcgccggggaaggggcttgagtgggtggcaaggatctaccccaccaacgggtataccagatacgccgacagtgtaaaaggcagatttacgataagcgctgatacctcaaaaaatacagcttatctgcagatgaattcactcagagcggaagacacagccgtctactattgctcccgctgggggggggatggattttacgcaatggactattggggacagggaactttggtgaccgtgagctccgccagtaccaagggtccaagtgtttttccactggccccctccagtaaaagcaccagcggtgggacagcagcgctcgggtgtctggtaaaggactactttcccgagcccgtgaccgtgtcttggaattcaggcgccctcacaagcggggtccataccttcccggccgtcctgcaaagcagtgggctgtattctctgagtagtgtcgtgacagtgccctcttcctccctcggcacccaaacttatatatgtaatgttaatcataagccgtccaacaccaaggtcgataaaaaagttgaacctaaatcctgcgataagacacacacatgccccccttgccctgctccggaactgctgggcggcccgtccgtgttcttgttcccccccaagccaaaggacaccctgatgatctcccgcacacccgaagtcacatgcgtggtggtggatgtgagtcatgaggaccctgaagtcaaattcaactggtatgttgacggagtggaggtacacaatgcgaagactaagcctagggaggagcagtataactctacttatcgcgtggttagcgtccttacagttcttcatcaggactggcttaatggcaaagagtacaagtgtaaggtatctaacaaagcgcttcccgctcccatcgagaaaaccatcagcaaagccaagggtcagccacgggagccccaggtgtatacactgcctccaagcagggatgagctcacaaagaatcaggtttcacttacatgtttggtcaaaggcttctatccctctgacatagcagttgagtgggagtctaacgggcagccggaaaataattacaagaccacacctcccgtgttggactctgatgggtcattcttcctttattctaaactcactgtggacaagtccagatggcagcaaggcaacgtgttttcatgtagcgtgatgcacgaggcactgcacaatcactatactcagaagtccctttccctgtctccgggc

SEQ ID NO: 15973 - DNA, 1419 bp, synthetic construct
  misc_feature 1..1419: note = source = /note="Description of Artificial Sequence: Synthetic coding sequence"
  source 1..1419: mol_type = other DNA
atggccgtgatggcaccacgcaccctggtcctgctcctttcgggggcgcttgcacttacccaaacctgggctgaggtccagcttgtcgaatcgggaggcgggcttgtgcaacccgggggatcactgcgtctctcctgtgcagcgagcggtttcaacatcaaggacacctatatacattgggtccgacaagcaccaggcaagggattggagtgggttgcacgtatttaccctactaacggttacactcggtacgcagattcggtgaagggtcgttttacgatctcggcagatacctccaagaataccgcctaccttcaaatgaactcactccgtgcagaagatactgcagtgtactactgctctaggtggggaggagacggattttacgcaatggactactggggacagggaactctggttactgtgtcatcagcctcgaccaaagggccatccgtctttccacttgctccttcgtcaaaatccacctcaggaggcactgcagcactcgggtgcctggtgaaagactattttcctgaacccgtgacggtgtcatggaattcgggtgcactgacctccggtgtgcataccttcccagcagtgctgcaatcgtcaggactctactcactttcctcggtggtgactgtgccgtcatcctcgcttggtactcagacctacatctgtaacgtcaaccataaacccagcaacaccaaagtggataagaaggtcgaacctaagtcgtgtgataagacgcacacctgccccccatgcccagcaccagaactgcttggcggcccctcggtgttcctgtttcctccaaagcctaaagatacccttatgatcagcaggactccagaggtcacttgcgtcgttgtggatgtctcccatgaggatccggaagtgaagtttaactggtacgtcgatggtgtggaagtgcataatgccaaaaccaagccaagagaagagcaatacaactccacctaccgcgtcgtctcggtccttaccgtcctgcatcaggactggcttaatggaaaggagtacaagtgtaaggtgtcaaacaaggctctccctgctcctatagaaaagactatatccaaggcaaagggtcagccaagggagccgcaggtatatactcttccaccctcgagagacgaactgaccaagaaccaagtgtctttgacttgcttggtgaaaggtttctacccgtccgatatcgctgtggagtgggaaagcaatggccagcctgaaaacaactacaaaaccacgccacccgtccttgatagcgacggatcctttttcctttacagtaagctgactgtggataagtcgcgctggcaacagggtaacgtgtttagctgttccgtgatgcatgaggcactgcataaccactacacccaaaaatcgctttcattgtcccctgga

SEQ ID NO: 15974 - DNA, 1419 bp, synthetic construct
  misc_feature 1..1419: note = source = /note="Description of Artificial Sequence: Synthetic coding sequence"
  source 1..1419: mol_type = other DNA
atggcggtcatggcaccgagaaccttggtcctgctgctctcaggagcattggcattgacgcagacttgggcggaggtgcagctcgtggagtctggcggaggcctggttcagccaggcggtagtctgaggctgtcctgcgcagcctccggtttcaacatcaaggacacctacatccattgggtccgccaggccccaggaaagggcctcgagtgggttgcccgcatctaccctactaacggctacacacgctacgccgattccgttaagggcagatttaccatctcagccgacactagcaagaacacggcctacctgcagatgaactcattgagggcggaggacaccgctgtgtactattgttctcgctggggcggcgacggtttctacgcaatggactactggggccaaggcactcttgtgactgtatcttcagcatctaccaaaggccccagtgtgttcccacttgccccctcttccaagtcaacatccggaggcactgctgctttgggatgtctggtgaaggattatttccccgagcctgttactgtatcatggaatagtggcgccctcaccagtggtgttcataccttccctgccgtacttcagtcatccggtctttattccctgtcctcagtggtgaccgttcccagtagtagcctgggtacccagacctacatctgtaatgtaaatcataaacccagcaacaccaaggtggataagaaagtggagccgaaaagttgcgataagacgcatacctgtccgccctgcccagcacccgaactgcttggaggccccagcgtctttttgttcccgccaaagccaaaagatactcttatgatatctagaacccctgaagtgacatgcgttgtcgtcgacgtgtcacacgaggatccagaagttaagtttaactggtacgtggatggtgtggaagttcacaatgctaagacgaagcccagagaagaacaatacaattccacatacagggtggtgtctgtcctgactgtgcttcatcaggactggctgaacggtaaagaatataagtgtaaggtctccaacaaggcgttgcccgcgccaatcgagaaaacgatttccaaggctaagggacagccccgcgaaccacaagtgtacactctgccgcctagcagagacgagctgacgaagaaccaggtgtccctcacttgcctggtcaagggtttttacccgagtgacatcgctgtcgagtgggagagcaacggccaaccagagaataactataaaacaacacccccagtgctcgactcagacggttcctttttcctctatagtaagttgactgtggataagtctaggtggcagcaaggtaatgtcttctcctgctccgtcatgcacgaagctctgcataatcactacacacagaagtcactgtccttgtcaccaggc

SEQ ID NO: 15975 - DNA, 1419 bp, synthetic construct
  misc_feature 1..1419: note = source = /note="Description of Artificial Sequence: Synthetic coding sequence"
  source 1..1419: mol_type = other DNA
atggcggtgatggccccgcggaccctggtgctgctgctttcaggagccttggcgctgacccagacctgggctgaagtgcaacttgtcgagtcgggaggcggactggtgcagcccggtggctcgctgcgcctctcctgtgccgcatcgggattcaatatcaaggacacttacatccattgggtccggcaggctccaggaaaaggtctggagtgggtggctcgcatctacccaactaacggttacaccagatacgcggatagcgtgaagggaagattcaccatctcagccgacacttccaagaatactgcctatcttcaaatgaattcacttagagccgaggacaccgccgtgtactactgctcccgctggggcggagatggtttctacgctatggattactggggccagggcaccctcgtgactgtcagctcagcctcgaccaagggtccgagcgtgttcccactcgcaccgtcgtctaagagcacttccggaggcaccgcagctctgggatgcctcgtcaaggattactttccggaaccagtcactgtgtcctggaactcaggggcccttacttccggagtgcacactttcccggcagtcctccagtcaagcggcctttattccctttcgtctgtcgttaccgtcccatcctcatccttgggcacccagacttacatctgtaatgtcaaccataagccgtcaaacactaaggtggataagaaggtcgagcccaagtcatgtgataagacccatacctgcccaccatgtcccgccccggaactcctgggcggtcccagcgtctttttgttcccaccgaaaccaaaagataccctcatgatcagcagaaccccggaggtcacgtgcgtcgtggtggacgtgagccacgaagatccggaagtgaagtttaactggtacgtggatggagtggaggtgcacaacgccaagacgaaaccgcgcgaagagcagtacaactccacctacagggtcgtgtcggtgctcaccgtcctgcaccaggactggttgaacggcaaggaatacaagtgcaaagtctctaacaaggcgctccctgcaccgatcgagaaaacgatctcgaaagcaaagggacaacctcgggagccacaggtgtacactctcccgcctagccgcgacgagctgaccaaaaaccaagtctcgttgacttgtttggtcaagggattctacccatcggacatcgcggtggagtgggaatcgaatggccagcctgagaataactacaaaactaccccacccgtgcttgacagcgacggctcattcttcctgtactctaagctcaccgtggacaagagccgctggcaacagggaaacgtgttttcgtgttccgttatgcacgaagcactgcacaaccattacacccagaaatccctgtcactgtccccaggc

SEQ ID NO: 15976 - DNA, 1419 bp, synthetic construct
  misc_feature 1..1419: note = source = /note="Description of Artificial Sequence: Synthetic coding sequence"
  source 1..1419: mol_type = other DNA
atggccgtcatggcaccccggaccttggtgctcctgctctcgggcgcactggccctcactcagacttgggctgaggtgcagctcgtggagtcgggcggaggactggtgcaacccggaggaagcctgcgcctgtcgtgtgcggcctccggcttcaacatcaaggacacttacatccattgggtgcggcaggcaccgggtaagggtctggagtgggtggcccgcatctacccgaccaacggctacacgagatatgccgactcagtgaagggccgcttcactatttccgcggacacctccaagaatactgcatatcttcagatgaactcactccgcgcagaggacaccgcggtctattactgcagccgctggggaggtgacggcttctacgcaatggactactggggacaaggcactctcgttactgtgtcgtcggcctcaaccaagggtccttcagtgtttccattggcaccgtcaagcaagtctacctcaggcggaaccgccgccctcggctgtctggtgaaggattacttccctgagcccgtgaccgtcagctggaattcgggagccctcacctcaggggtgcatacttttccggccgtcctgcagtcctccgggctgtactccctgtcatcagtggtgaccgtcccttcctcgagcctcggaactcagacttacatttgcaacgtgaatcacaagcccagcaatactaaggtggacaaaaaggtcgaaccgaagtcctgcgataagacccatacgtgcccgccgtgcccagccccggagctgctcggtggccctagcgtgttcctgttcccacccaagccgaaggacaccctcatgatctcgcggaccccggaggtgacttgcgtggttgtggatgtcagccacgaggacccggaggtgaaattcaactggtatgtcgatggcgtggaagttcacaacgcaaagacgaagcctcgcgaagaacaatacaacagcacctaccgggtcgtgtcggtcttgactgtcctgcaccaagactggctgaacggaaaggaatacaaatgcaaagtctccaacaaggccctgccagccccgatcgaaaagacgatctcaaaggcgaaaggccaacccagagaaccccaggtgtacactctgccaccgtcgcgggacgagctcacgaagaatcaggtgtctctgacctgcttggtcaagggtttctacccgtccgacatcgccgtggaatgggaatcaaacggacagcccgaaaacaactacaagacgaccccgcctgtgctcgacagcgacggctccttctttttgtacagcaaactgaccgtggataaaagcaggtggcaacaggggaatgtgttctcctgctccgtcatgcatgaagctctgcacaaccattacactcagaagtcgctgtccctgtcgccggga

SEQ ID NO: 15977 - DNA, 1419 bp, synthetic construct
  misc_feature 1..1419: note = source = /note="Description of Artificial Sequence: Synthetic coding sequence"
  source 1..1419: mol_type = other DNA
atggcagtaatggccccgcgcacactcgtgttgctgctctcgggcgctctggccctcacacagacctgggccgaggtgcagctggtggagtccggcggaggtttggttcagcctggcggctctttgcggctttcctgcgccgcctcaggtttcaacattaaagacacgtatatccattgggtgcggcaggctcccggcaaggggctggagtgggtggccaggatctacccaactaatggctatacgcgatatgccgactccgtgaaggggcgcttcactattagcgcagatacatcaaagaatacagcctaccttcagatgaacagcctcagggctgaggacactgcagtgtactactgttccaggtgggggggcgacggattctacgcaatggactactggggacagggcacactggttacggtgagctctgcctctactaaaggaccatcagtatttccgctcgccccctcttccaagtctacctccggcggtaccgctgctctgggatgcctggtcaaagactattttccagaaccagttactgtgagttggaactctggggccctgacatccggggtgcacacttttcctgctgtgcttcagtcttctggactttatagcttgagtagtgtcgtcactgtgccttcctctagtctgggcacccaaacatatatttgtaacgtcaatcacaagccaagtaacactaaagtggacaagaaggtggaacctaaatcttgtgacaaaactcatacatgtcctccctgcccggcgcctgaacttttgggaggcccatcagtatttttgttccccccgaaacctaaagataccctgatgatctcccgcacacctgaggtgacatgcgttgtggttgacgtgagccacgaggatcctgaggtgaagtttaactggtatgtagacggcgtggaggtccacaatgccaaaactaaaccccgcgaagagcagtacaatagcacgtatcgcgttgtgtcagtactgactgttttgcaccaggattggctgaacggaaaggagtacaagtgcaaggttagcaataaggcactgccggctccaatagaaaaaacaatttcaaaagcaaagggccaaccaagagagccccaagtttacacccttccacccagccgcgatgagcttaccaaaaaccaagtcagcctcacttgtctggtgaagggattttacccaagcgacatcgcagtggagtgggaatctaatggccagcccgagaataattataagactacacccccggtactggactccgatgggtcctttttcctttatagcaagttgacagtggataagtcccgctggcagcagggcaatgttttctcctgtagcgtgatgcatgaggctctgcacaatcactatacacagaagagtctctctctgtcaccgggg

SEQ ID NO: 15978 - DNA, 1419 bp, synthetic construct; identical to SEQ ID NO: 15960
  misc_feature 1..1419: note = source = /note="Description of Artificial Sequence: Synthetic coding sequence"
  source 1..1419: mol_type = other DNA

SEQ ID NO: 15979 - DNA, 1419 bp, synthetic construct
  misc_feature 1..1419: note = source = /note="Description of Artificial Sequence: Synthetic coding sequence"
  source 1..1419: mol_type = other DNA
atggccgtaatggccccgcgcactctggtcctgctcctctcgggagcgttggcgttgactcaaacctgggcagaagttcagttggtggaatccggcggtggtttggtgcaacctgggggtagcctgagactcagctgtgcagcttccgggttcaacattaaagatacctacattcattgggtgaggcaagcaccgggaaagggtcttgaatgggtggcaagaatctacccaaccaatgggtacacccgctacgccgactccgtgaaaggaagatttactatctcagccgatacctcgaagaatactgcataccttcagatgaacagcttgagagctgaagatactgctgtgtactactgttcacggtggggaggcgacgggttttatgccatggactactggggacaaggtacccttgtgacggtttctagcgcctcaaccaaaggcccttccgtgtttccccttgcaccctcgtcgaagagcacttccggaggtaccgctgccctggggtgccttgtcaaagattactttcctgaaccagtcaccgtgtcgtggaatagcggagcacttacgtcgggagttcatacttttccggcggtcttgcaatccagtgggctgtactctctgtcctcagtcgtgactgtcccgagcagttcgcttggcactcaaacctacatttgtaacgtgaaccataagcctagcaacacgaaggtcgacaagaaagtggaaccaaaatcatgtgataagacccatacctgccccccttgtcctgcgcctgagctgctgggcggcccgtccgtgttcctctttccccccaagccaaaagatacccttatgataagcaggacccctgaggtgacctgtgtggtggtggatgtgtctcacgaagatcctgaagtcaaattcaattggtacgtggacggtgttgaggtccacaatgcaaagaccaagcctcgggaagagcagtataacagcacttacagagtcgtgtcggttcttactgtgctccatcaggactggctgaacggaaaggaatacaaatgcaaggtatcgaacaaggcacttccagccccaatcgaaaaaaccatttcaaaggcaaaaggacagcctcgtgagccacaggtgtacactctgcccccatcacgagatgaactcaccaagaatcaagtctcactgacgtgtcttgttaagggcttttacccatccgatatcgctgtggagtgggagtccaatggccagcccgagaacaactataagactacgcctcccgttcttgattccgatggatcgtttttcctgtacagtaagctcactgtggacaagagccgttggcaacagggtaacgttttctcgtgctccgtgatgcatgaagcacttcacaaccactacactcaaaagagtctctccctgtccccagga

SEQ ID NO: 15980 - DNA, 1419 bp, synthetic construct
  misc_feature 1..1419: note = source = /note="Description of Artificial Sequence: Synthetic coding sequence"
  source 1..1419: mol_type = other DNA
atggcagtgatggcaccaagaactttggtccttctcctttccggagcactcgcgctgactcaaacttgggcagaggtgcagttggtggaatccggaggtggtctggtgcaacccggaggctcactgcgcctgtcctgtgccgcctcgggctttaacataaaggacacctatattcattgggtgcgtcaagcgcctggcaagggtcttgaatgggtcgcccggatctacccaaccaatggatacactcgatacgcagattcggttaagggccggtttactatcagcgcagatacttccaagaatactgcctatctgcaaatgaactcactgcgcgcggaggataccgccgtctactactgttctaggtggggtggtgatggcttctacgccatggactactgggggcaaggaaccttggtgaccgtgtcctcggccagcactaaagggccttcagtgtttcccttggccccttcctccaaaagcacctccggtggaactgcggccctggggtgtcttgtgaaggattactttcctgaaccagtgaccgtctcttggaattctggggccctgacctcgggcgtccatacttttcctgcggtgcttcaatcgtcgggactctactcacttagcagcgtggtgactgtcccatcgtcgtcccttggaactcagacctacatttgtaacgtcaaccataagccctctaacaccaaagtggacaaaaaggttgaaccgaagtcatgcgataagactcatacctgtccaccgtgccctgcacctgaactccttgggggacccagcgtgtttctgttccctcctaaacctaaggatactctgatgatcagccggacgcctgaagtgacttgcgtcgtggtcgatgtgtcccacgaagatccggaagtgaaattcaactggtacgtcgatggagtggaggtccataatgcgaaaaccaagcctagggaagagcaatacaacagtacttacagagtggtgtcagtgcttaccgtcctgcatcaagactggcttaacgggaaggaatacaaatgtaaagtgtcgaataaggcccttccggcgcctatcgaaaagactatttcgaaggctaagggccaacctagagaaccacaagtgtacacccttccaccatctagggatgaactgaccaagaatcaagtgtctctgacgtgtctcgtgaaggggttctacccaagcgacatcgcagtggaatgggagtccaatggacagccggagaataactacaagactactcccccggtactggattccgacggttcattctttctgtactcaaagttgactgtcgacaaatcgcgctggcagcagggaaacgtgtttagctgctcagtgatgcatgaagcactgcacaatcattacactcagaagagcctgtcgctgtcgccaggt

SEQ ID NO: 15981 - DNA, 1419 bp, synthetic construct
  misc_feature 1..1419: note = source = /note="Description of Artificial Sequence: Synthetic coding sequence"
  source 1..1419: mol_type = other DNA
atggcggtgatggcaccgagaacgcttgtgttgctgctgtccggagcactcgcgttgactcagacctgggcagaggtgcagctggtggagtcggggggaggcttggtgcaaccggggggctccctgaggctctcctgtgcggccagcggattcaacataaaggatacgtacatccactgggttagacaggcacccggaaagggactggaatgggtggcacggatctacccgaccaatggttacacgagatacgcggacagcgtgaagggccggttcacgatcagcgcggacactagcaagaacaccgcgtacctccaaatgaattcgctgcgcgcggaagataccgccgtgtactactgcagccgctggggtggggacggcttctacgccatggactactggggacagggtactctggtgaccgtgtcctccgcttccaccaagggaccgtccgtgtttcctctggctccttcgagcaagtccacctcgggaggcaccgccgctctcggatgcttggtcaaagactacttcccggagccggtgaccgtcagctggaactctggagcgctgacttcgggagtgcacacttttcccgccgtcctgcagtcgagcggtctgtactcactgtcgtccgtcgtgactgtgccctcatcctcgcttggtacccaaacctacatctgcaacgtgaatcacaaaccgtcaaatactaaggtggacaaaaaggttgagccgaagtcgtgcgacaagacccatacctgcccgccgtgcccagccccggaactgctgggcggaccaagcgttttcctcttcccgccgaaaccgaaggatactctgatgattagccggacgccggaagttacctgcgtggtggtggatgtgagccacgaggatccagaagtgaagttcaactggtacgtcgacggcgtcgaagtccataacgccaagactaaaccacgggaagaacagtacaattccacctatcgggtggtgtccgtccttactgtgctgcaccaagattggttgaacggtaaggaatacaagtgcaaagtctcaaacaaggcactgccagccccgattgaaaaaacgatttccaaggcgaagggccagccccgcgagccgcaggtttacaccctgccaccgtcgagggacgagcttactaagaaccaggtatcactcacgtgtctggtcaaaggattttacccttccgacatcgcggtggagtgggaatctaacgggcagccggagaataactacaagactacccctcctgtccttgactcggatggatccttctttctgtactcgaagctgacggtggacaagtccaggtggcaacagggaaacgttttcagctgcagcgtcatgcatgaagctctgcacaatcactatacgcaaaaaagcctctccctgagccctggt

SEQ ID NO: 15982 - DNA, 1419 bp, synthetic construct
  misc_feature 1..1419: note = source = /note="Description of Artificial Sequence: Synthetic coding sequence"
  source 1..1419: mol_type = other DNA
atggccgtgatggcgcctaggactctcgttttgctgttaagcggggctctggcactgactcaaacctgggcagaggtacagcttgtggagagtggaggtggtctcgtacagcccggcggctcccttaggctgtcttgcgcagccagtggcttcaatatcaaggatacatatatccactgggtcaggcaagcacccggcaaaggcctggaatgggtagctcgcatttaccccacaaatgggtacacccggtacgccgacagcgtcaaggggaggttcactatcagcgctgacactagcaagaacacggcctatcttcaaatgaattctctgagggctgaagacacagccgtgtactattgcagtcgctggggaggtgacggtttttacgcgatggactactgggggcagggaaccctcgtgacagtatcctcagcttcaaccaagggcccttcggtgtttccactagcaccctcaagcaagtctacctccggtggcaccgcggctctaggctgcctcgttaaagattatttccccgagcctgtgactgtttcttggaacagcggcgctttgacaagcggcgttcacaccttccccgcagtgctccagtcatctggcctgtattccttgagttctgtggtaactgtccccagctcctcactgggtacgcagacatatatttgcaacgtgaaccacaaaccctcaaacacaaaggtggacaaaaaagtggagccgaaaagctgtgataagacacacacatgccctccatgtcctgcaccagaacttcttggaggtccgtccgtgttcctattcccaccaaagcccaaagacacccttatgattagccggacgcctgaagttacttgtgttgttgttgatgtgagccacgaagacccggaggtgaaattcaattggtacgtggacggcgttgaagtgcataatgctaagaccaagcccagagaggagcagtataactctacttatcgggtcgtttctgttctgaccgtgctccaccaggattggcttaatggtaaagagtacaagtgcaaagtgtccaacaaggcactacccgccccaatcgaaaaaacaatttcaaaagccaaggggcaaccacgagaacctcaggtgtacacacttcccccatctcgggacgaactgacaaaaaaccaggttagcttgacatgcctagtcaaggggttctacccgagcgacatagctgtggagtgggagagtaacggccagcccgagaataattacaagacaactccaccagttctggattccgatggtagttttttcctctactcaaaactcacagtcgacaagtcgagatggcagcagggtaatgttttcagctgcagcgtgatgcacgaggccctacacaaccactatacacagaagtccctgtcattgtcccctggc

SEQ ID NO: 15983 - DNA, 1419 bp, synthetic construct
  misc_feature 1..1419: note = source = /note="Description of Artificial Sequence: Synthetic coding sequence"
  source 1..1419: mol_type = other DNA
atggcagtcatggcacctaggaccctggtgctccttctatccggggcacttgccctgacccagacttgggcagaggtgcagttggttgaaagcggtggcgggctagtacagccgggcggctctttacgactaagctgcgcagcaagcgggtttaacatcaaagatacgtacatccactgggtgaggcaggctcccggtaagggtcttgagtgggtcgcaagaatatacccgactaacgggtataccagatatgccgactctgtgaaggggcgttttaccattagtgccgacacctctaaaaataccgcttacttgcagatgaacagcctgagagcagaagacacagccgtgtattactgttctcggtggggcggcgatggattctatgccatggattattggggccaggggactcttgttacagtctcctccgcctccacaaaaggaccatccgttttcccgctggcacctagtagtaaatccacgagcggggggaccgccgccctcggctgtttggtaaaagattattttcctgagcccgtcacagtatcctggaactcaggagctctaacctccggcgtgcataccttcccagctgtccttcagtcttctggcctctacagcctttcatccgtggtcaccgtccctagtagtagcttgggaactcagacctacatatgcaacgtcaatcacaaaccgagtaatacaaaggtggacaagaaggtagagcctaagtcttgcgataagacccacacatgcccgccctgtcctgctccggagctcttagggggcccatccgtatttttgttcccgcctaaacccaaagataccctcatgatctccagaactcctgaggtcacctgcgttgttgtcgacgtgtcacatgaagatccagaagtgaagttcaactggtatgttgacggggtggaggtacacaatgcaaaaaccaagccacgggaagagcagtataactctacttaccgcgtggtgtccgtcttgaccgttctgcaccaggattggttaaatggcaaagaatataaatgcaaggtgtcaaataaggcactacccgcacctattgaaaaaacgatcagcaaagcgaagggccagccaagggagcctcaggtttatacactaccaccttctcgggacgaactaaccaagaaccaggtgtcgttgacatgtctagtgaaagggttttatccgtctgatatcgccgtcgagtgggagagcaacggccagccagagaataactacaagacaaccccccccgtgctcgactctgacggctctttttttttgtactctaaactaacagtggataaatcccgttggcaacaggggaatgttttcagctgcagcgtcatgcacgaggcactccacaatcactatacgcagaagtctctctctctttctcccggc

SEQ ID NO: 15984 - DNA, 1419 bp, synthetic construct
  misc_feature 1..1419: note = source = /note="Description of Artificial Sequence: Synthetic coding sequence"
  source 1..1419: mol_type = other DNA
atggcggtgatggcaccgagaaccctggtgttgctgctctcaggcgctctcgccctgactcaaacctgggctgaagtgcaactggtcgaatccggaggaggactggtgcagccaggtgggtcactgcggctgagctgtgctgcatcgggcttcaatatcaaggacacttacattcactgggtgagacaagcacctggaaagggactggagtgggtggctcggatctacccgacgaatggttacacccggtacgcagattcggtgaaaggacgcttcaccatcagcgcggacacttcgaagaacacggcttaccttcagatgaattcgctcagggccgaagatactgccgtgtactactgttcgcggtggggtggcgatgggttctacgcgatggactactggggacaggggactctcgtgaccgtgtcctccgcctcgaccaaggggccttcagtgttcccgcttgccccatcctcaaagtccacctcgggaggaacggccgctctgggatgcttggtgaaagactactttccggaacctgtcactgtgtcgtggaactcaggagccctgacgagcggggtccacactttcccggccgtgctgcagtcgagcggtctgtactccctgtccagcgtcgtgactgtgccgtcatcctcactcggaactcagacctacatttgtaacgtgaaccacaaaccgagcaatacgaaggtggataagaaagtcgaaccgaagtcatgcgacaagacccacacctgcccgccttgcccggccccggagctcctgggtggaccatctgtgttcctcttccccccgaagcctaaggacactctgatgatctcgcgcactccggaagtgacctgcgttgtggtggatgtgagccatgaggatcctgaggtgaagtttaactggtacgtggatggagtggaggtgcacaatgcgaaaaccaaaccacgggaagaacagtacaatagcacttacagagtagtctcggtgctcacggtgctgcaccaagattggctcaatggcaaagagtacaagtgcaaagtgtccaataaggcactgccggcaccaatcgaaaagaccatctcgaaagccaaaggacaacctagagagccgcaggtttacacgctccctcctagcagagacgaactcactaagaaccaggtgagcctcacctgcctggtcaagggattctacccgagcgacatcgctgtggagtgggagtcaaacggtcaaccggaaaacaactacaaaactacgccgcctgtcctcgactcggacggatcgttctttctgtattcaaagctgaccgtggacaaatcccgctggcagcaaggaaatgtgttcagctgttcagtgatgcacgaagctctgcacaaccactacacccagaagtccctttccttgtcccccgga

SEQ ID NO: 15985 - DNA, 1419 bp, synthetic construct
  misc_feature 1..1419: note = source = /note="Description of Artificial Sequence: Synthetic coding sequence"
  source 1..1419: mol_type = other DNA
atggccgtgatggcacctcggaccctggtactgctgctgtccggcgctctggccctgacgcagacctgggccgaagtgcagcttgtggaatcgggtgggggtttggtacagcctggaggctcactgagactgtcgtgcgccgcttctggattcaacatcaaagacacctacattcactgggtcagacaagcccctggtaagggactggagtgggtggcaagaatctaccctactaacggctatacgcggtacgcggactcggtgaagggacgctttactatcagcgcggatacctccaaaaacactgcataccttcagatgaatagtctcagagctgaagatactgcggtctactactgctcgcggtggggaggagacggattctatgcgatggattactggggacagggaaccctggtcacggtgtcaagcgctagtactaagggaccctccgtgtttccgctggccccgtcgtctaaatcgaccagcgggggaactgctgccttgggctgtctggtgaaggactatttcccggagccggtgactgtctcatggaattcgggcgccctgacttcgggggtgcacacgtttccggctgtgctccaaagctcgggtttgtactccctcagcagcgtggtgaccgtgccttcctcatccctcggaactcaaacttacatttgcaacgtgaaccataaaccgtcaaatactaaggtcgacaaaaaggtggagccaaaatcgtgcgacaagactcatacctgtccaccatgcccggcacctgagctgctcggaggaccatccgttttcttgttcccgcctaagccaaaggacaccctgatgatcagtcggaccccggaagtgacctgcgtcgtggtggatgtgtcacatgaagatccagaagtgaagttcaattggtacgtggacggcgtggaagtccacaatgccaaaacgaaaccgagagaagagcagtacaattccacttacagggtggtttcggtgctcaccgtgctgcatcaggactggctcaacggcaaggagtacaagtgtaaggttagcaataaagccctgccggcaccgatagaaaagaccatctcaaaggccaaggggcaacccagggaacctcaagtatacactctgcctccgtcaagggatgagctcacgaagaaccaggtgtccctgacctgcctggtcaaaggattctacccctccgatatcgcagttgagtgggaatcgaacggccaaccagagaacaactacaagactaccccaccagttctggactccgacggcagcttcttcctgtacagcaaactcaccgtcgacaagtcacggtggcagcagggtaacgtcttttcctgctcggtcatgcacgaagcactccacaaccactacacgcagaagtcgctgtcgctctcaccggga

SEQ ID NO: 15986 - DNA, 1419 bp, synthetic construct
  misc_feature 1..1419: note = source = /note="Description of Artificial Sequence: Synthetic coding sequence"
  source 1..1419: mol_type = other DNA
atggccgtcatggcgccacgcaccctggtgctgctgctgtccggagccttagcattaacccagacttgggccgaggtgcagcttgtagaatctggaggcgggctcgttcagcccggtggtagcctgcggctgtcctgcgcagcttccgggtttaacattaaggacacttatatccactgggtgcgccaggcacccggtaagggactagaatgggtggctaggatctatccaaccaatggatacacaagatacgccgactcagtgaagggaagattcaccatcagtgccgacaccagcaagaatacagcgtatttacagatgaactccctccgtgccgaagataccgccgtgtactactgctcaagatggggcggcgacggcttttatgccatggactactggggacaggggacgctcgtgacagtaagctctgcgtctacgaaaggaccttcagtcttccccctggcgccttctagtaaatctacgtccgggggcacagccgccctgggttgtctggtgaaggattacttcccggagcctgtgactgtgtcttggaatagcggcgcgttaacctctggcgtgcatacttttcccgcagtgctacagagcagcgggctctatagcctctctagtgtggtgacggtgccatcttcctcacttggaactcagacatacatatgtaatgtgaaccacaaacccagcaacactaaagtggacaaaaaggtggagcctaagtcctgcgacaaaactcacacatgcccgccctgcccagctccagagctgttggggggcccttccgtatttctgtttccccccaaaccgaaggataccctgatgatctctcgtactccagaagtcacttgtgttgtcgttgatgtgtcacacgaggacccagaggtgaagtttaattggtatgtcgacggagtcgaggtacataatgccaaaaccaaacctagggaggagcagtataactcgacatatcgagtggtgtcagttctgacggttctccatcaggactggctcaatggcaaagagtacaagtgtaaagtgagcaataaagcattgcctgcccccatcgagaaaactattagcaaggccaaagggcagccaagggagccacaagtttacaccctccccccgtcccgagatgagctaacaaaaaaccaggtgagtttaacttgtctggtgaaagggttctatccgtccgatatcgctgtggaatgggagagcaacgggcaacccgaaaataactataagaccacgccgccggtgctggactcagacggcagctttttcctttactcaaagcttacagtcgacaagagcaggtggcagcaaggcaatgtttttagctgcagtgtcatgcatgaagcactgcacaatcactatactcaaaagtccctttctctgagccccggc

SEQ ID NO: 15987 - DNA, 1419 bp, synthetic construct
  misc_feature 1..1419: note = source = /note="Description of Artificial Sequence: Synthetic coding sequence"
  source 1..1419: mol_type = other DNA
atggcagtcatggcaccgagaacacttgtactgcttttatctggggctctagcactcacccagacatgggctgaagttcagctggtggagagcggcggcggccttgttcaaccaggaggttctttacgccttagttgtgccgcatccggctttaatattaaagacacctatattcattgggtacgccaagcaccgggcaaaggccttgaatgggttgcgcgaatctaccctaccaatggctatacaagatatgcagatagtgtcaaaggacgctttacgattagcgccgatacatctaaaaatacagcttatttacaaatgaactcattgcgtgctgaagatacagccgtatattattgcagcagatgggggggtgatgggttctatgcaatggattattggggccaaggaacattagttacggtcagctctgcgtccacgaagggaccttccgtctttcctcttgctccttcttctaaaagtacatcgggcggtacggccgctcttggatgcttagttaaagactattttcctgaaccggtgacggtatcttggaatagcggtgcactgacctcaggcgtccatacgtttcctgctgtccttcaatcatccggtctttattctttgtcctccgtggtaacagttccgtcaagttccttaggaactcagacgtatatttgtaacgtgaaccataaaccatctaatacaaaggttgataagaaggtagaaccgaaatcatgtgacaagacacatacatgtcctccctgccctgcacctgaattgttaggcgggccatcagtgtttcttttccctccgaaacctaaggatacgttgatgattagcagaacacccgaggtcacatgcgtcgtagtagatgtaagccacgaagaccccgaggttaaattcaattggtatgtagatggtgtggaagtgcataacgctaaaactaaacctcgggaggaacagtataatagcacatatagagttgtgtctgtattaacggtcctgcatcaggactggctgaatggtaaggagtacaaatgtaaagtgtctaataaagctctgccggctccaattgagaaaacaatctcaaaagcgaaaggacagccgcgtgaacctcaagtctatacgttacccccgtcccgtgacgaactgaccaaaaatcaagtctcattaacatgtcttgtcaaggggttttacccgtcagatattgccgttgagtgggagtcaaacggacaacctgagaataactataaaacgacgcctccggtattagatagcgatggatctttctttttatattccaagttgactgtggacaagagccgctggcagcagggcaatgtatttagctgctcagtgatgcatgaagcgttacacaatcattatacgcagaaatctttatctctttctcctggc

SEQ ID NO: 15988 - DNA, 1419 bp, synthetic construct
  misc_feature 1..1419: note = source = /note="Description of Artificial Sequence: Synthetic coding sequence"
  source 1..1419: mol_type = other DNA
atggcggtgatggccccgagaactcttgttctgcttctctcaggagcgctcgcgcttacccagacttgggcagaggttcagctggtcgagtctggcggaggcttagtccagccaggcgggagcctgcggctcagctgcgccgcttccggctttaacatcaaggatacttatattcactgggtccggcaggcgccggggaagggactcgagtgggttgcccgtatataccccaccaacggctacactcggtatgcggattctgtgaagggtaggttcacaataagtgctgacacgagtaagaataccgcttacctgcagatgaactccttgcgggccgaagataccgctgtttactattgctctcggtgggggggagacggcttttatgcaatggactattggggtcagggcaccctggtcacggtatctagtgcttcaacgaaaggaccatccgtctttcctctggcgcccagttctaaaagtacatcagggggcactgctgcattggggtgcttggttaaagactactttcccgagccagtgactgtttcatggaatagcggcgccttgacatctggagtgcatactttcccagctgttttgcagagtagtggcttatatagtttgagcagcgttgtgaccgtgccttcatcttcactgggcactcaaacctacatctgtaatgtgaaccacaagccgagtaacactaaggtggataagaaggttgaacccaagtcctgcgacaagacgcacacttgccccccgtgtccggctccagaacttctggggggcccctccgtgttcctgtttccgcccaaaccgaaagacacactcatgatcagtcgcacacctgaggtaacatgtgttgtggtcgatgtgtcccatgaagaccctgaggtcaaattcaactggtacgtggacggcgtggaagtgcacaatgccaagacaaaacctcgtgaggagcagtacaacagtacatacagagtggtatccgtcctcactgtgctgcaccaggattggctaaatggaaaggagtacaaatgtaaggtgagcaataaggctctgcccgcgccgatcgaaaagaccatctccaaagccaagggacagccaagagaaccacaggtctacaccctgcctccctcccgcgacgagcttacgaaaaaccaggtgtctctcacttgcctggttaaaggtttttatccgtcggacattgctgtcgaatgggagtccaacggccagccagagaataactataaaactactccccccgtgttggattcagacggctcctttttcttgtacagcaagctgacagtcgataaatctagatggcagcaaggcaacgtcttttcttgtagtgtgatgcatgaggcgctgcacaatcattatactcagaaatctctgtcactgtcacccggc

SEQ ID NO: 15989 - DNA, 1419 bp, synthetic construct
  misc_feature 1..1419: note = source = /note="Description of Artificial Sequence: Synthetic coding sequence"
  source 1..1419: mol_type = other DNA
atggcagtgatggcacctcgtactcttgtgctgctgctgtccggtgccctggcactgactcaaacctgggcagaagtccaactggtagagtccggaggggggctcgtgcaacctggagggagcctcagactctcgtgcgccgcatcaggctttaacattaaagacacttacatccactgggtgagacaagctccgggcaagggactcgagtgggtggcgaggatttaccctacgaatggatacacccgctacgccgacagcgttaagggtagatttaccattagcgcagatacctccaagaacaccgcatatctgcagatgaactcgctccgggcagaagatactgcagtgtactactgtagccggtggggaggagacggtttctacgcgatggactactggggtcagggtactctggttaccgtgtcgtcggcgagcactaagggaccctcggtgtttcctcttgcacctagctccaagtccacttcgggtggcactgctgctctgggctgtctcgtgaaagattacttccctgaacctgtgaccgtgtcttggaattctggagcacttacttcgggagtgcatacgtttcctgccgtgcttcaatcgtcgggcctttactctttgtcatcagtggtcaccgtgccctcatcgtcgctgggtactcaaacctacatttgcaacgtcaaccacaagccctcaaacactaaggtggacaagaaggtcgaacctaagagctgtgacaaaactcatacgtgtcccccatgtcctgcaccggaactcctgggaggtccgtcggtgttcctttttcctcctaaacccaaggatactctgatgatctcccggactccagaggtgacctgtgtcgtggtggacgtttcgcatgaagatccggaagtgaagttcaactggtacgttgacggagtggaggtgcacaacgctaagaccaaaccacgagaagaacagtacaattcaacctatagagtcgtcagcgtgcttaccgtgctgcatcaagactggcttaatggtaaggagtacaagtgtaaagtgtccaacaaggcacttccagcaccgattgaaaaaacgatctcgaaagccaaggggcagccaagagagccacaagtgtacaccctgccaccctccagagatgaacttactaagaaccaggtcagcttgacctgtctggttaagggattctacccctccgatatcgcagtggaatgggaatcgaacggacagccagaaaacaactacaaaactactcctccagtgctggactccgacggatcatttttcctgtactcaaaacttactgtggacaaatcgagatggcagcaagggaacgtgtttagctgtagcgtgatgcatgaggcacttcataatcattacacccagaagagccttagcctgagcccagga

SEQ ID NO: 15990 - DNA, 1419 bp, synthetic construct
  misc_feature 1..1419: note = source = /note="Description of Artificial Sequence: Synthetic coding sequence"
  source 1..1419: mol_type = other DNA
atggcagtgatggccccccgcacgcttgtgcttctgcttagcggtgccctggccctgacccagacctgggcagaggtgcaactcgtcgaatcaggtggtggactggtgcagccaggaggctcgctgcggctgagctgtgcagcatcgggattcaacattaaggacacctacatccattgggtcagacaagcaccaggaaagggtttggagtgggttgcccgtatttaccccactaatgggtacaccaggtatgcagatagcgtgaaaggccggtttaccatttcggcagacacttcgaagaatactgcttacttgcagatgaattcgcttagagcagaagatactgccgtgtactactgcagcagatggggaggagacggtttttacgcaatggattattggggtcaaggaacgcttgtgaccgtctcctcagcttccaccaaagggcccagcgtgtttccgctggctccttcgtccaagtcaaccagcgggggtactgccgcacttggatgtctggttaaggactattttcctgaacctgtgactgtgtcatggaactcgggagcacttacttccggggtgcatactttcccagcagtgctgcagtcatccgggctttactctcttagctcggtcgtgactgtgccatcctcctcactcggaacccagacttacatttgcaacgtgaaccataaacctagcaataccaaggtggacaagaaggtcgaacctaagtcgtgtgataaaacccatacctgtccgccttgtccggctccggagctgcttggaggtccttctgtgtttctttttccaccaaaacccaaagatacccttatgatatcccgtactcctgaagtgacttgcgtggtcgtcgatgtgtcgcatgaagatcctgaagtcaagtttaactggtacgtcgatggagttgaagtgcataatgcaaagactaaacctagagaggaacaatacaattcgacctaccgagtggtcagcgtcctcactgtcctgcaccaagattggctcaacggcaaagaatacaagtgtaaggtttcaaacaaggctctgccagcaccaattgaaaagactatctcgaaggccaagggtcaacctcgtgaaccacaagtctacactctgccaccaagcagggatgaactgactaaaaaccaagtgtcccttacctgcctcgtcaagggcttttacccaagcgatatcgccgtcgagtgggagtcaaacggtcagcctgaaaacaattacaagaccacgccccctgtcctggattcggacggttcatttttcctgtactcgaaacttaccgtggacaaatccagatggcaacagggaaacgtgttcagctgtagcgtgatgcatgaagcactgcataatcattacactcaaaagtcgctctcgctgtcgcctggt

SEQ ID NO: 15991 - DNA, 1419 bp, synthetic construct
  misc_feature 1..1419: note = source = /note="Description of Artificial Sequence: Synthetic coding sequence"
  source 1..1419: mol_type = other DNA
atggcagtcatggcacctcgcactctggttctgctgctgtcgggtgctctcgctctgactcagacgtgggcagaagtccagctcgttgaaagcggcggcgggctcgtgcagccaggtggcagcctgcgtctgagttgtgcagcgtccggttttaatattaaggacacttacatccactgggtccgtcaagcccctggcaagggtttagaatgggtggcacgaatttacccgaccaatggttacactcgctatgcggatagcgtcaagggccgattcactatcagcgcggacaccagtaagaatacggcttaccttcagatgaacagcctgcgcgcggaagatactgcagtttattattgttcacgctggggtggagacggcttctacgccatggattactggggccaaggcaccctggttactgtctctagcgctagcactaaaggtccgtcggtattccccctcgcgccgtcctctaagagcaccagcggcggcaccgccgcgctaggctgtcttgtcaaggattacttcccagagcctgtcaccgtgtcttggaattctggcgcgcttacgagcggagtccatacctttcccgccgtgctgcaaagcagcggtctttactcattgagctcggtggttaccgtacctagtagcagtttgggtacccagacctacatctgcaacgtaaaccataaacctagtaacaccaaggttgacaagaaagtggaacctaagtcgtgtgataaaacacatacttgcccgccgtgtcccgcccctgagctgctgggcggccccagcgtgtttctgtttccacctaagccaaaagacacgctgatgatcagccgcaccccggaagttacctgtgttgtggttgacgtgagccacgaggatccagaagtgaaattcaactggtacgttgatggtgtagaagtgcacaacgctaaaactaaaccgcgcgaagagcagtacaactctacgtaccgggtggttagtgttttgactgtcttgcaccaggactggctcaacggtaaggaatataaatgcaaagtgagcaacaaagcgctgcctgccccaattgaaaaaaccatctctaaagcaaagggtcagccacgcgagccacaggtatacactctgccgccttcccgcgacgagctcactaaaaatcaagtcagcctcacctgtttggtcaagggcttctatccctccgacatcgctgtggaatgggagagcaacggtcagcccgaaaataattacaagactacgccacctgtgctcgacagcgatggtagcttctttctgtatagcaaactgacagtggacaaaagccgctggcaacagggtaacgtgttcagctgttctgttatgcacgaggcattgcacaatcactacacacaaaaaagcctgagcctgtctccaggg

SEQ ID NO: 15992 - DNA, 1419 bp, synthetic construct
  misc_feature 1..1419: note = source = /note="Description of Artificial Sequence: Synthetic coding sequence"
  source 1..1419: mol_type = other DNA
atggccgtaatggcgcctagaaccctggtccttctcctgtccggagcacttgcacttactcagacctgggcagaggtgcagcttgtggaatcgggcgggggactggtgcagcctgggggttcgcttcggctcagctgtgcagcgtcgggtttcaacatcaaggatacttacattcattgggtgagacaagctcccggtaaaggacttgaatgggtggcgcgcatttaccccaccaacggttacactagatacgccgactcggtgaagggccgattcactatttcagccgacacttccaaaaacactgcatacctgcagatgaacagcctgcgagcggaagataccgctgtttactactgcagcagatggggcggcgatggattttacgccatggattattggggacagggaaccctcgtgaccgtgtcctcggcgagcaccaagggaccaagcgtgtttccactcgcaccctcgtcgaagtcgaccagcggaggaaccgcagcactgggatgtctcgtgaaggactactttccagagccagtgacggtgtcttggaattcgggagcacttacttcgggtgtgcatactttccccgcagtgcttcagtccagcggtttgtactccctcagctcggtggtgactgttccttcgtctagcctgggaacccagacgtacatttgtaacgtaaaccacaagccgtcgaataccaaagtggataagaaggtcgaaccaaagtcgtgtgataagactcatacgtgtccaccatgtcctgcccctgaactgctggggggaccgtcggtgttcctgtttcctcccaagccgaaagatacccttatgatctcacggacgccggaagtgacctgcgtggtggtggatgtgtctcatgaggacccagaagtcaagtttaactggtatgtggatggtgtcgaagtgcataatgccaagaccaaacctagagaggagcagtataactcaacttaccgtgtggtgtcagtgcttactgtgctgcatcaagactggctgaacggtaaggagtacaagtgtaaagtcagtaacaaggcacttcccgcacctattgaaaaaactatttcaaaggcaaagggtcaaccccgggaaccgcaagtgtacactcttcctccatcgagagatgaactgaccaaaaaccaagtctcccttacctgccttgtcaagggcttttacccatctgacattgcagtcgagtgggaatcgaacggccaacctgagaacaattacaaaactactcctcctgtgctggattcggatggttcctttttcctttactcgaagttgacggtggataagtccaggtggcaacagggtaatgtcttttcgtgtagtgtgatgcatgaagcgctccataaccactacacccagaagtccctgtcgctctcgccaggg

SEQ ID NO: 15993 - DNA, 1419 bp, synthetic construct
  misc_feature 1..1419: note = source = /note="Description of Artificial Sequence: Synthetic coding sequence"
  source 1..1419: mol_type = other DNA
atggctgtcatggctcctcggacgctggtactgctgctcagcggggcccttgctcttacacagacctgggcggaagtgcagcttgtggaatcaggagggggattagtccaacctggtgggagtctccgcctgtcctgtgcggctagtggattcaatatcaaggacacctatatacattgggtacgacaggcacctggaaagggactagagtgggtcgcccgaatatatcctaccaacggctacactagatacgctgatagcgtgaagggtagatttacaataagtgctgataccagcaaaaatacagcttatctccaaatgaactccctccgcgccgaagacaccgccgtgtactattgttcaaggtgggggggagatggcttttacgctatggactactgggggcagggtactctggttaccgtatcctccgcctctactaaaggcccaagtgtctttcctctggcgcctagctctaaaagcacctcgggcgggacagcagctctcgggtgcttagtaaaagactattttcccgaacctgtgactgtgagttggaactcaggagctctgacttccggggtgcacacatttcctgctgtactgcagtcctcaggattgtatagtttgtctagcgtggtcaccgtgccaagtagctctctaggaacacagacttacatttgtaacgtgaaccacaagcctagtaacacgaaggtagacaagaaggtggaacccaagtcatgcgacaaaacccatacatgccctccgtgccctgcgcctgagcttctgggtgggccttcagtatttctgttccctccaaaacccaaggataccctgatgatttctcggacacctgaggttacctgcgtggtcgtggacgtgagccacgaggaccctgaagttaagtttaactggtatgtggacggagtagaggtccataatgctaagactaagccacgggaggaacagtacaactccacttatcgagtggttagtgtcctcactgtcctgcaccaggactggctgaatggcaaggaatacaagtgcaaggtctctaacaaggcactccctgctcctattgaaaaaactattagcaaggcgaaaggccaaccaagggaacctcaggtttatacattgccaccgtcccgggatgaacttacaaagaaccaggtctctcttacgtgccttgtgaaaggcttctacccatccgatatcgcagtggagtgggagtctaacgggcagcccgaaaacaattacaagaccacgcctcccgtgttggacagtgacgggagtttttttctgtacagtaaactgacagtggacaaatcacgatggcaacaagggaacgttttctcttgcagcgtgatgcacgaagccctgcacaaccattatacccagaaaagcctgtctctgagtcctggc

SEQ ID NO: 15994 - DNA, 1419 bp, synthetic construct
  misc_feature 1..1419: note = source = /note="Description of Artificial Sequence: Synthetic coding sequence"
  source 1..1419: mol_type = other DNA
atggcggtgatggcacctaggactttggtgctcctgcttagcggcgcgctcgccctcacccagacttgggccgaggttcaacttgtggagagcggcggagggctcgtccagccaggcggaagtctgagactttcgtgtgccgcatcaggctttaacatcaaagatacctacattcattgggtgcgccaagctccgggaaagggattggaatgggtggctcgtatctacccgaccaacggttacacccgttatgcagacagcgtgaagggccggtttacgattagcgcagatacttcgaagaatactgcatacttgcaaatgaattcgcttcgggcggaggatactgctgtgtactactgttcgcgctggggtggagacggattttacgcaatggactactgggggcaaggcacccttgtgacggtgagcagtgccagcaccaaaggaccatcagtgtttccgcttgcccctagctccaagtcgacctccggtggcaccgcagcgcttgggtgcctcgtgaaggattacttccctgaacctgtgactgtgtcatggaattcgggagcacttaccagcggggtccatacctttcccgccgtcctccaatccagcggactgtactcgctcagctctgtggtcactgtcccttccagctccctgggaacccaaacctacatctgtaatgtcaaccataaaccttcgaacactaaagtggataagaaagtggaacctaaatcgtgtgataagacccacacctgtcctccttgtccagcacccgaactgcttggaggaccatccgtgtttctttttcctcctaaaccgaaggacaccttgatgataagccggactccagaggtgacttgtgtcgttgtggacgtgtcccacgaagatccggaggtgaagttcaactggtacgtcgacggagtcgaagtgcacaacgccaagactaagcctagagaagaacaatacaattctacctatcgggtcgtgtcggtgctgacggtgctccaccaggactggcttaacggcaaagagtacaaatgcaaggtgtcgaataaggccctccctgcaccaatcgaaaagactatttccaaggccaaaggtcaaccacgtgaaccacaggtgtacactcttccaccaagccgggatgagcttactaagaatcaggtttcgcttacgtgcctggtcaaaggcttttatccttcggacattgcagtggaatgggagagcaacggtcagcctgaaaacaattacaaaactactccacctgtgctggatagcgacggcagcttcttcctttactccaagttgaccgtggacaagtcgcgatggcaacaggggaacgtcttttcgtgctccgtgatgcatgaagcacttcataaccattacacgcagaagagcctttcgctttcgccagga

SEQ ID NO: 15995 - DNA, 1419 bp, synthetic construct
  misc_feature 1..1419: note = source = /note="Description of Artificial Sequence: Synthetic coding sequence"
  source 1..1419: mol_type = other DNA
atggcagtcatggccccccgtactctggtgcttttgcttagcggtgcattggccctgacgcagacctgggcagaagtccaactcgtggaaagcggagggggtcttgtccaacctgggggatcgcttcgactttcgtgtgcagccagcggtttcaacattaaagatacctatattcattgggtccgacaggcgccaggtaagggacttgagtgggtggcacgaatttaccctactaatggctacactcggtacgcagacagcgtgaaagggcgctttaccatttcagcagacacgtccaaaaacactgcctacctccagatgaacagcctccgggcagaagataccgctgtctattactgttcgagatggggaggggatggattctatgcaatggattactggggtcagggaactctggtcactgtctcaagcgcaagcactaagggacccagcgtctttccactggccccctcctccaagtctacttccgggggcacggcagcgctcggatgtcttgtgaaggattactttccagagccagtcaccgtctcatggaattcgggggcacttacctcgggtgtgcatacttttcctgcagtgttgcaatcaagcggtctgtacagccttagcagcgtggtcaccgtcccaagctcctctctgggtactcagacctacatctgtaacgtgaatcataagcccagcaacaccaaggtggataagaaggtggagcctaaatcgtgcgacaaaactcatacttgtccaccctgtccagctcccgagcttttgggtggaccgagcgtgtttttgtttccgcctaaacctaaggacacgcttatgatctcgagaactcctgaggtcacttgtgtggtggtcgatgtgtcgcatgaagatccagaagtgaagttcaattggtacgtggatggagtggaggtccacaacgccaagactaaacctagagaagaacaatacaactcaacttacagagtggtgagcgtcctcactgtgctgcaccaagattggctcaacggtaaagaatacaaatgcaaagtgtccaacaaagcactgccggccccaattgaaaagaccatttccaaggccaagggccaacctcgcgaacctcaagtctataccctccctccttcccgcgatgaactcaccaagaatcaagtctcccttacctgtctcgtgaagggcttttacccttccgatatcgcagtggaatgggagtcaaacggacaaccagagaataactacaagaccacccctcccgtcctggattcggatggttccttcttcctctactcaaaactgaccgtggataagtcgcggtggcagcagggcaatgtgttttcctgcagcgtgatgcatgaggcacttcataatcattacactcaaaagtccctttcgctgtcgccgggc

SEQ ID NO: 15996 - DNA, 1419 bp, synthetic construct
  misc_feature 1..1419: note = source = /note="Description of Artificial Sequence: Synthetic coding sequence"
  source 1..1419: mol_type = other DNA
atggcagtcatggcccctcggactctggtgcttctgctgtccggggctctggctctcactcagacctgggctgaagtgcagttggtggagagcggaggcggcctcgtgcagccaggggggagcttgaggctcagctgtgccgcatctgggtttaatatcaaggacacctacatccactgggtccgacaagctcccggcaaagggctggagtgggtcgctcgcatctacccaactaatggttataccaggtacgcggactctgtgaagggacgattcactataagtgccgacacgagtaaaaatacagcctacctccagatgaacagcttgcgagccgaagacacggctgtctactattgctcacggtggggtggtgacgggttttatgccatggactattggggccagggaactctggtgaccgtcagttccgccagcacaaaggggccttccgtgttccctctggctccctcctccaagagtacatctggcggcaccgccgctttgggttgcttggtgaaagattattttccagaacctgttaccgtgtcttggaactcaggtgcccttacctcaggtgtgcatacatttcctgccgtgctgcagtctagcggcctgtactctctcagcagcgtcgtgaccgtgccgagcagtagtctcggaacacagacctatatatgcaacgtgaatcacaagcccagcaacactaaagtagataagaaggtggagcccaaatcatgtgataaaacacacacctgtcccccctgtcctgctccagagctgctcgggggacccagcgttttcctgtttcctcccaagccaaaagacacactgatgatctccaggacacccgaggtaacatgcgtggtggttgatgtatctcacgaggacccagaagtcaaattcaactggtatgtcgatggagttgaggtccacaacgctaagaccaaaccaagagaagagcaatataattccacatacagggtggtgtccgtattgacggtgctgcatcaggattggctgaatggaaaggagtacaagtgtaaagtgtctaacaaagccctgcccgcccctattgaaaagaccataagtaaggccaaaggccagccccgggagcctcaggtctacactctgccaccttctcgggacgaattgactaagaaccaggtctccctgacatgccttgtgaaaggattttacccctcagatatcgccgtggagtgggagtctaatggccagcctgaaaacaattataagactactcctcccgtgcttgatagcgatggcagctttttcctgtactctaagctgactgtggacaagagccggtggcagcaaggcaatgtattcagctgttctgtcatgcatgaggcccttcataaccactatactcaaaagtcactctccctgtcaccaggg

SEQ ID NO: 15997 - DNA, 1419 bp, synthetic construct
  misc_feature 1..1419: note = source = /note="Description of Artificial Sequence: Synthetic coding sequence"
  source 1..1419: mol_type = other DNA
atggccgtgatggctcctcgcacactcgttctcttgctcagcggagctttagccctgacccagacctgggcggaagtccagctagttgagtcaggcggagggctggttcagcccggcggttccttgcgtctgtcctgtgctgcgagcggattcaacataaaagacacctatattcactgggttaggcaagcccctggcaaaggcctcgagtgggtggcgcgcatatacccaacaaatggctatacccggtacgcagactcggtcaagggtcgattcactatctctgccgataccagtaagaataccgcctatctgcagatgaatagccttagagccgaggacaccgccgtctattactgtagtcggtggggaggggacggcttctacgctatggactattggggacagggcacactggtgacagtgtcctcagctagcactaaaggaccgagcgtgtttcccctggcaccctcttccaaatccacgagcggcggcacagctgcgctcggatgcttggtcaaggactatttccccgagcctgttacagtgagttggaactcaggagccctcacttcgggggttcatacatttccagcagtgttgcagtcgtcagggctttatagcctgtcaagtgtagtgaccgttccgtcctcttcactgggaacgcagacatatatctgcaacgtaaaccacaagccatctaacaccaaagtggacaagaaagtggagcctaagtcttgtgataaaacccacacatgccctccgtgtcccgcgcccgaattgctgggcggcccgtccgtgtttctcttcccacctaagcccaaagataccctgatgatatccagaacgccagaggttacctgcgtcgtcgtagatgtgtctcatgaagatcccgaagttaagttcaattggtatgtggatggagtggaagtgcacaacgccaagaccaagcctcgcgaggagcaatataatagcacttatcgggtggtgtctgtgctgaccgttctgcaccaggactggctgaatgggaaggagtataagtgtaaggtgtcaaataaggcgttgccggcaccaatcgagaaaacaatctccaaggctaagggccagccccgggaaccacaggtctacactcttccgccatccagggacgagctgaccaagaaccaggtctcactgacttgtctggtcaaaggcttctacccttcagacatagcagtcgagtgggaatccaacgggcaaccggaaaacaactataagaccacacccccagtgctcgacagcgatggatccttctttctgtatagtaagctgaccgtggacaagagcaggtggcagcaggggaatgtgttcagttgctccgtgatgcacgaggcgctgcataatcactatacccagaaatctttgagcctttcgccgggc

SEQ ID NO: 15998 - DNA, 1419 bp, synthetic construct
  misc_feature 1..1419: note = source = /note="Description of Artificial Sequence: Synthetic coding sequence"
  source 1..1419: mol_type = other DNA
atggccgtgatggcacctaggacactcgtcctgctccttagtggagcattagcactgacccaaacctgggccgaagtgcagcttgtggaaagcggcggcgggcttgtgcagcccgggggaagcctcagactgtcttgtgctgcttctggatttaacattaaggacacctacatccactgggtgaggcaggcaccaggcaaaggcctcgagtgggtggcaaggatctacccgactaatggatacaccaggtatgcggactctgtcaagggaaggtttaccatctccgctgatacatcaaaaaatactgcctacctgcagatgaactctcttagagcagaggatacagcagtttactactgtagccgctggggaggagacggattctacgcaatggactattggggccagggaactctcgtcaccgtttcctcagcctcgactaaaggaccaagcgtgtttccgctagcaccctcctctaaaagcaccagcggcgggacagcggctcttggctgcctggtcaaagattatttcccagagccggtcacagtcagttggaattctggcgcgttgactagtggagtgcacacgttcccagctgtcctgcagtcttctggactatattctcttagttcggtcgtaaccgtgccaagtagcagcttgggaactcagacatatatttgtaacgttaatcacaaaccctcaaataccaaagttgataaaaaagtcgagccgaagtcctgcgataagactcacacttgccccccatgtccggcaccggagttacttggagggccttctgtcttcttgtttccaccaaaaccaaaagatacacttatgataagcagaactcccgaggtcacttgcgtcgtcgtggatgtgtctcacgaggaccctgaggttaaatttaactggtacgtggatggagtggaagtccacaacgccaaaactaagcctcgggaagaacaatacaactcaacctatcgggtggtctcagtacttacggtgctacaccaggactggctgaacggaaaagaatataagtgcaaagtgagcaacaaggctctccccgcacctatcgaaaaaacaatctctaaagcaaaaggccagcctcgcgagccacaggtctatacattgccccctagcagggacgagctgaccaagaatcaggtcagtctcacctgtctggtcaaaggattttacccatccgacatcgcggtggaatgggaaagcaacggccagccggagaacaattacaagacaacccctccagtgctcgattcagacggctctttctttctgtacagtaagcttacagtcgataagtctagatggcagcaagggaatgtgttcagctgttctgtcatgcatgaggcgcttcacaaccactacacccagaagtcactctcattgagccctgga

SEQ ID NO: 15999 - DNA, 1419 bp, synthetic construct
  misc_feature 1..1419: note = source = /note="Description of Artificial Sequence: Synthetic coding sequence"
  source 1..1419: mol_type = other DNA
atggccgtaatggctccccgtactttggtgcttttgctttcaggcgccctggctcttacacagacctgggctgaggttcaacttgtagaatctggagggggtcttgtgcagcctggggggagcctgagactcagttgtgctgcaagcgggtttaacattaaggatacatatatccattgggttcggcaggctcctggtaagggtctggaatgggttgccaggatataccctacaaatgggtataccagatacgccgactctgttaagggtcgattcacgattagtgccgacacttcgaagaacactgcgtacttgcaaatgaactcattgcgtgcagaggatacagcagtttattattgttcgcgatggggtggggacggtttttacgctatggactattggggccaaggtacgcttgtgactgtcagcagtgcatctactaaaggaccctcggtctttccacttgctccgtcatctaagagtacgtccggaggtactgccgctttgggttgtctcgtcaaggattacttccccgagcctgttaccgtttcctggaattccggggctttgacttccggtgtgcacacttttccagctgttctccaaagttctggattgtacagcctttcttctgttgtgaccgtcccgtcaagttctcttgggactcagacctacatatgtaacgttaaccacaaaccctcgaataccaaagtagacaagaaggtcgaaccaaagtcttgcgacaagactcatacttgcccgccatgtcccgccccagagctattgggagggccttccgttttcttgttcccccctaagccaaaagacactcttatgatatcaagaacacctgaggttacatgtgtcgtcgttgacgtgagtcatgaagatccagaagtgaaatttaactggtacgttgatggtgttgaggttcacaatgccaagactaaaccgagagaagaacaatataattccacttacagggtagtttcggttttgaccgtactccaccaagactggttgaacggtaaggaatacaaatgtaaagtgagcaacaaagctctcccagctccgattgaaaaaacgatcagtaaggcgaaggggcagcctcgtgaacctcaggtttatactcttccaccttctcgtgatgagctcactaagaaccaagtgagtcttacttgcttggtaaaaggtttctatccatcagatatagccgttgagtgggagagtaatggtcagccagagaataattataagacgactccacctgttcttgattcagacgggtcctttttcctttactcaaaactgacagtggataagagtcgatggcagcaaggtaatgttttcagctgtagcgtgatgcatgaggcactccacaaccactatacacaaaaatctctatctctatcccctgga

SEQ ID NO: 16000 - DNA, 1419 bp, synthetic construct
  misc_feature 1..1419: note = source = /note="Description of Artificial Sequence: Synthetic coding sequence"
  source 1..1419: mol_type = other DNA
atggctgtcatggctcctcgcacattggtacttctactcagtggtgccctcgccctgacccagacgtgggctgaggtacagcttgttgagagcggagggggcctggtgcagcccgggggcagcttaagattatcatgtgctgcaagtggcttcaatatcaaggacacatatatccactgggtgcgacaggcccccggcaagggattggagtgggtggcgcgcatttatccaaccaatggttacactcgatatgcagattccgtgaaaggccggttcaccatctcagcggatacatctaaaaataccgcctatctgcagatgaatagcctgagagcggaggacacagccgtgtactactgctcacggtgggggggggacgggttctacgccatggactactggggacagggcaccctggtgacagtgagttcagccagtacgaagggcccgtctgtatttcccctagctccatcgagcaaaagcacatctggaggtactgccgccctgggatgcctcgtcaaggattacttcccggagcctgttacagtttcatggaactcaggggccttaacatctggcgtccatacatttcctgctgtgttgcaatcatctgggctgtattcactcagtagtgtggtgactgttccgtcatcttccctgggtactcaaacatatatttgtaatgtgaaccacaagccgtctaacacaaaggtggacaagaaggtcgagcccaagtcttgtgacaaaacacatacctgtcctccctgtccggcacctgagttactgggcggaccctcagtgtttctttttcctcccaaacccaaggatacactgatgatctcacggacccccgaggttacttgtgtggttgtcgatgtctctcacgaagaccccgaagtgaaattcaactggtacgtggacggtgttgaggtgcacaacgccaaaactaagcccagagaagaacagtacaacagcacttaccgtgtcgtcagcgtgctgacagtgctgcatcaggattggctgaatggcaaggaatataagtgtaaggtctccaacaaggctctgcccgcacccattgagaaaaccatttccaaggcaaagggacagccaagggagccccaggtttacacacttcccccaagtcgcgatgagctgaccaaaaaccaggtatcactgacttgcctggtgaaaggcttttatccaagcgacatcgcagtggaatgggagtccaacggtcagccagagaataattacaagacaacacccccggtgctggattcagatggatctttttttctctacagcaagctgacagtagacaagtctagatggcagcaagggaacgttttctcctgttcggtgatgcatgaggcgctccacaatcactatacccagaagagcctttcactttctcccggt

SEQ ID NO: 16001 - DNA, 1425 bp, synthetic construct
  misc_feature 1..1425: note = source = /note="Description of Artificial Sequence: Synthetic coding sequence"
  source 1..1425: mol_type = other DNA
atggccgtgatggcgccgcgcaccctcgtgctgctgctctctggagccctggcgctgactcagacctgggctcaggtgcagctgcagcaaccgggagcagagctggtgaaaccgggagcttccgtgaaaatgtcgtgtaaggcaagcggatacaccttcacgtcatacaatatgcattgggtgaagcagacgccaggccgcgggctggaatggatcggcgccatatatccaggcaacggggatacctcctataaccagaagtttaaaggcaaggccactctgaccgcggacaagtcctcctcgactgcgtacatgcaactgtcgtcgctgaccagcgaagatagcgcggtctactactgcgctcggtctacttactacggcggcgactggtacttcaacgtgtggggggccggaactaccgtcactgtgtccgcggccagcaccaagggaccgagcgtgtttccgttggcgccttcgtcgaaatcgacctcgggcggaaccgccgccctgggatgccttgtcaaggactacttccccgaaccggtgactgtctcgtggaattctggcgcactgacttcgggcgtgcacacgtttcctgccgtgctccaatcgagcggcctctattccttgagctccgtcgtgactgtgccgtccagcagcctcggaacccagacctacatctgtaacgtcaaccataaaccgtccaacactaaagttgataagaaggtggaaccaaagtcatgtgataagactcacacctgcccgccgtgcccagcaccggaattgctcggaggtccgtcggtgtttctctttccacccaagccgaaagatactctgatgatctccagaactcctgaggtgacttgtgtggtggtcgacgtgtcacacgaagatccggaggtgaagttcaactggtacgtggatggtgtcgaggttcacaatgcaaagactaagcctcgcgaggaacagtacaactcaacttacagagttgtgtccgtgctcaccgtgctccaccaagattggttgaacggtaaggaatacaagtgtaaagtctccaataaggctctccccgcgccgatcgagaaaaccatctctaaagccaagggacaaccgcgcgagcctcaggtctacactctgccgccttcccgggacgaactcactaagaaccaagtgtcgctcacctgcctggtgaagggcttctacccttcagacatcgcagtcgaatgggagtccaatggtcagccggagaataactacaagaccacccctccggtcctcgactcagatggatccttcttcctgtactcgaaactcacggtggacaaatcacgatggcagcaaggaaacgtgttctcctgctcggtcatgcatgaagcgctgcataaccattacacccagaagagcctgtcactgtccccaggcaag

SEQ ID NO: 16002 - DNA, 1425 bp, synthetic construct
  misc_feature 1..1425: note = source = /note="Description of Artificial Sequence: Synthetic coding sequence"
  source 1..1425: mol_type = other DNA
atggcagtcatggcccctcgcacactggtgttgctactgtcgggagccttggccctcactcaaacatgggctcaggtgcaactacagcagcctggggcagagctggtaaagccaggagcttccgttaagatgagttgcaaggcgtcaggatatacttttacaagttataatatgcattgggtcaagcagacccctgggaggggactagagtggatcggagctatctatccaggcaatggagatacatcctacaaccaaaagttcaagggcaaagcaaccctgacagccgacaagtcctcttccactgcttacatgcagctgtcatcccttacctcggaagattcggccgtgtactactgtgcccgcagtacatactatggaggcgactggtatttcaacgtgtggggagccgggacgaccgtgaccgtcagcgccgcatccacaaagggaccgagcgtcttccctttggcccctagctccaagtctaccagtggggggacggccgctctgggatgtctggttaaggactattttcccgaacccgtgaccgtctcttggaactccggggcactcactagtggagtgcacactttcccggccgtcttgcagtcaagcggactctactctctgtcttctgtcgtgacggttcccagctctagcctggggacccagacttacatctgtaatgtgaatcataagcccagcaatactaaggtggacaagaaggtggagccgaaatcttgcgacaagacacatacctgcccgccgtgtccagcccctgagctgctgggcggtcccagcgtgtttctctttcccccaaagcctaaggatacacttatgattagccgaactcctgaagttacctgcgtcgtcgtggacgtgagtcatgaagaccctgaagtgaaattcaactggtacgtggatggggtggaggtccataacgccaagacaaaaccacgtgaagaacagtacaactccacttatcgggttgtgagcgtcctgaccgtgctgcaccaggactggctgaatggtaaggaatacaagtgcaaggtttctaacaaagctctccctgccccaatagagaagaccatctctaaggccaagggccaacctcgagagccccaggtgtacacattgccccccagtagggatgagctgaccaagaaccaggtttcgcttacttgcttggtgaagggattctatccttctgacatcgccgtggaatgggagtcgaacggccaacctgagaataactacaagacaacaccgcccgtattggattccgatgggtcattctttctttatagtaagctgacagtagataagtcccgatggcagcaaggcaatgtcttctcctgttctgtcatgcatgaggcacttcacaatcactatacacagaaatcattgagcctgtctcccggtaaa

SEQ ID NO: 16003 - DNA, 1425 bp, synthetic construct
  misc_feature 1..1425: note = source = /note="Description of Artificial Sequence: Synthetic coding sequence"
  source 1..1425: mol_type = other DNA
atggccgtcatggccccgcggacccttgtgcttctcctttccggggcgcttgccctgactcaaacctgggcgcaggtgcagctgcagcagccgggtgcagaactggtgaaacctggagcctcggtaaagatgtcgtgtaaggccagcgggtacacttttacctcgtacaatatgcactgggtgaaacaaacccccggacgcggtctggagtggatcggcgcaatctacccgggaaatggagacacgtcgtacaaccagaaattcaagggaaaggctactctgaccgcggacaaatccagctcgaccgcttacatgcaactgtcctctcttactagcgaagatagcgcagtgtactactgtgcacgatcgacctactacgggggagactggtactttaacgtgtggggagcaggcactacggtcaccgtgagcgccgccagcaccaaaggaccctcggtgttcccactggccccgtcgagcaagtccacgtcagggggaaccgcagctctcgggtgcctggtgaaggactacttcccagagccggtcaccgtgtcatggaactccggtgccctgacttcgggggttcacacttttccagctgtcctccagtcgtccggcctgtactcgctgtcgtcagtggtcaccgtgcccagctccagcttgggaactcaaacttacatctgtaatgtcaaccataagccatcgaacaccaaagtcgacaaaaaggtggagcctaagtcctgcgataaaacccatacctgccctccatgcccggcaccggaactgctgggcgggccgtcggtctttctctttccgccaaaaccaaaggatacgttgatgatctcccgcacccctgaggtgacttgtgtggtcgtggatgtgtcgcatgaggacccggaggtcaagttcaattggtacgtggatggtgtggaggtccataatgccaagactaagcctcgcgaagaacagtacaactccacctaccgggttgtctcggtcttgaccgtgctgcaccaagactggttgaacggaaaggaatacaagtgtaaggtcagcaataaggctctgcctgcgcccatcgaaaagactatcagcaaagccaagggacagcctagggagccgcaagtctacaccctccccccatcgagggatgaactgactaagaaccaggtgtccctgacctgtctggtgaagggattctacccctcggacatcgccgtggagtgggagtcaaacggtcaaccggagaacaactacaagaccacccctccggtcctggactccgatgggtcattcttcctgtatagtaaactcactgtcgacaagtctcgctggcagcaggggaacgtcttttcgtgctcggtgatgcatgaagccctgcacaatcactacactcagaagtccctgtcgttgagcccgggaaag

SEQ ID NO: 16004 - DNA, 1425 bp, synthetic construct
  misc_feature 1..1425: note = source = /note="Description of Artificial Sequence: Synthetic coding sequence"
  source 1..1425: mol_type = other DNA
atggccgtgatggccccaaggactcttgttctactcctgtctggggctctcgccctcacacagacatgggcccaggtgcagctccagcagcccggggctgaacttgttaaacctggggcctccgtcaaaatgagttgtaaagcttcggggtatactttcactagttataatatgcattgggtcaaacagacacccggaagagggctggaatggattggagcaatctatccagggaacggggatacttcttataatcagaaatttaaaggaaaagcaactcttactgctgataaatcttcctcaactgcttacatgcagctctcttccctgacatcagaagattctgctgtctactattgcgcccggtctacttattatgggggggattggtatttcaatgtgtggggggccgggacaactgtcacagtgtcggctgctagtacaaaagggccatctgtattcccactagcccccagttcaaaatctacttcaggaggaactgccgctctagggtgcctggtgaaagattactttccagaacccgtaacagtctcctggaattctggggccctgacatccggagtacacacttttcccgcagtgctgcagagtagtggactatacagtctttcatctgtggtcactgtgccctcatcatccctcggaactcagacatatatctgcaacgtaaatcataaaccaagtaacacaaaagtagataaaaaggtggagccaaaatcttgcgataaaactcacacatgccccccttgccccgcacctgaactcctcgggggaccctccgtctttctatttcctccaaaacccaaagatacactcatgatatcccgaacgccagaagtgacatgcgttgtggtcgatgtgtcccacgaagatcctgaagtgaaattcaactggtatgtggatggagtggaagtccacaacgcaaagactaaaccccgcgaggagcagtataacagtacttatcgagttgtgtcagtattgactgtgcttcatcaggattggttaaatgggaaagaatacaaatgcaaagtgtctaacaaagctttacccgcccctatcgaaaaaacaatatcaaaagcaaaaggacagccgagagagccccaggtatatactttacccccatcacgcgatgaactgactaaaaatcaagtgagtctcacttgcctcgtgaaaggattttatcccagtgatatagctgtggaatgggaatctaacgggcagccagaaaacaactacaaaactacacctcctgtgctggactccgatggatcattcttcctttactccaagctcacagtcgataaaagtcggtggcagcagggaaacgtattctcttgttccgtaatgcacgaagccttacacaatcattatacacagaaatcactgtcacttagtcctggaaaa

SEQ ID NO: 16005 - DNA, 1425 bp, synthetic construct
  misc_feature 1..1425: note = source = /note="Description of Artificial Sequence: Synthetic coding sequence"
  source 1..1425: mol_type = other DNA
atggcggttatggctccgcgcactctcgttctgcttctgagcggagcacttgctctcacccagacctgggcacaggttcagctgcagcaacctggcgccgaactcgtgaaacctggcgcgtcggtgaagatgtcgtgcaaagcgtcgggatatactttcacttcgtacaatatgcactgggtcaaacaaactccgggcagagggctcgaatggattggtgcgatctacccgggaaatggagatacgagctacaatcaaaagtttaaaggaaaagcaaccctgacggccgacaaatcctcctccaccgcctacatgcagctctcgagcctcactagcgaggatagcgccgtctactactgcgccaggagcacttactacggaggagactggtacttcaacgtttggggtgccgggactactgtgaccgtgtcggccgcctcaaccaaaggaccaagcgtctttccccttgctccatcatcaaagtcaacctcggggggaaccgctgctctgggctgtctggtcaaggactacttcccggagccagtgactgtgagctggaacagcggtgctctgactagcggagtgcacactttcccggctgtgctgcaatcttcgggcctgtactcactgtcatccgtggtgaccgtcccatcatcgtcgctgggaacccagacgtacatttgcaacgtgaatcacaagccatccaataccaaggtcgacaaaaaggtggagccaaagtcctgtgacaaaacgcatacctgccctccttgtcctgctcctgaacttctgggaggcccgtcggttttcctgttcccgccgaaaccgaaggacacgctgatgatctccagaaccccagaagtgacttgcgttgtggttgacgtgagccacgaggacccggaggtgaaattcaactggtatgtggatggagtggaggtccataatgccaagactaagccccgggaggaacagtacaactcgacttatcgggtggtgagcgtgctgactgtcctgcatcaagactggctcaacggcaaagaatacaagtgcaaggtgagcaacaaggcactgcctgccccgatcgagaaaaccatctccaaggcaaagggccaaccacgcgagccgcaggtgtacacccttccaccttcacgggatgagcttacgaagaaccaggtgtcgctcacttgcttggtcaagggattctacccaagcgatatcgcggtggaatgggaatcgaacggacaacccgaaaacaactacaaaaccactccgcctgtcctggatagcgacggttcgtttttcctctactcgaagctgaccgttgataagagcagatggcagcagggtaatgtcttttcatgcagcgtgatgcacgaagctctgcacaatcattacacccagaagtctctctccttgagccccggcaag

SEQ ID NO: 16006 - DNA, 1425 bp, synthetic construct
  misc_feature 1..1425: note = source = /note="Description of Artificial Sequence: Synthetic coding sequence"
  source 1..1425: mol_type = other DNA
atggcagtgatggccccgcgcaccttagtgttgctgctgtcaggcgctctggctctaacccagacttgggctcaggtgcagctgcagcagcccggggcggagttggtcaagcctggtgcatcggtcaagatgagctgtaaggcgagtggatacacgttcacatcatacaatatgcattgggttaagcagaccccggggcgcgggctcgagtggattggcgccatctacccagggaatggtgacacatcctacaaccaaaaattcaagggcaaggccacactgaccgccgataagtcctcaagcaccgcatatatgcagctgtcatcgttgacctcagaggactcagcggtatattattgcgcgagatctacctattatggcggcgattggtatttcaacgtgtggggtgccgggactactgtaaccgtatccgccgcctcgacaaaagggccaagcgtgttccccctggctccctctagcaagagtacctccggtggaaccgcagcccttggatgtctggttaaagactacttcccagagcccgttactgtcagctggaacagcggtgctctaaccagcggggtccatactttcccagctgtcttacaatcatcaggtctgtacagcctgagtagcgtagtgactgtgccatcaagctccctcggcacgcagacatatatctgcaatgtgaaccataaaccatccaatacgaaagtggataaaaaggtggagcctaagagttgtgacaaaacacacacctgcccgccctgtccggcccctgaactcttagggggtcctagtgtttttctttttccaccaaaacccaaagatacgctaatgatttcacggacacccgaagtgacgtgtgtcgtggtagacgtatcccacgaggatccggaggtgaagtttaactggtatgtcgatggcgtggaggtccataacgccaagactaaaccccgcgaggagcaatataatagcacataccgagtagtctcggtgctgacagtgttgcaccaggactggctgaacggcaaggagtataaatgcaaagtgtcgaataaggccctccctgccccaattgaaaagactatctccaaggcgaagggacagccacgggagcctcaggtatacacactgccgccgagcagggacgagctcacgaaaaatcaggttagcctaacctgcctggtgaaggggttctatccatccgacattgccgttgaatgggagtctaacgggcagccagagaacaactacaagactacgccccccgttctggactccgacggcagtttcttcctgtattcaaagctgactgtcgacaagagtcggtggcagcagggaaacgtcttctcctgctccgtaatgcatgaggctctgcacaaccattacacccagaagtcgttgtcactgagtccgggcaag

SEQ ID NO: 16007 - DNA, 1425 bp, synthetic construct
  misc_feature 1..1425: note = source = /note="Description of Artificial Sequence: Synthetic coding sequence"
  source 1..1425: mol_type = other DNA
atggcggtgatggcaccaagaaccctggtgttgcttctgtccggagcactggcacttacgcagacctgggcacaggttcaattgcaacagcctggggcagagttggtgaagccaggcgcttccgtcaagatgtcatgtaaagcctcaggttatacgtttactagctacaatatgcattgggttaagcaaacccctggtcggggtctggaatggattggtgcaatctaccctggtaacggagacacctcgtataatcaaaagttcaagggaaaagcaacccttaccgctgataagtccagctctacggcctacatgcagcttagctcccttacgtcggaagatagcgcagtctactactgcgcccgtagcacttactatggtggagactggtactttaacgtttggggagcagggaccactgtgactgtgtcagcagcctccactaaaggcccatcagtgtttccactggccccttccagcaagtcgacttcaggaggaaccgcagcccttggttgtcttgtaaaggattactttccagaaccggtcaccgtctcctggaactccggcgcactgacctcgggtgtgcatacttttcctgccgtgttgcagtcctcggggctgtacagcttgtccagcgtcgtgactgtccccagctcgtcgctgggaactcagacgtacatttgcaacgtaaaccataagccgagcaacaccaaggtggataagaaggtggagcctaagagctgtgataaaactcacacttgtcctccctgtccagcaccggaactgctcggaggtcctagcgtgtttctctttccacctaaaccgaaggatactttgatgatatcccggacccctgaagtcacctgcgttgtcgtggacgtcagccatgaagatccagaggtgaagttcaattggtacgtggatggggtggaagtgcataacgccaaaaccaagccacgcgaagaacaatacaatagcacctacagagtcgtgtccgtgcttacggtccttcatcaggattggttgaacggaaaagaatacaagtgtaaagtgagcaacaaggcacttcccgcgcctatcgaaaagaccatttctaaagcgaaagggcaacctcgagaacctcaagtgtacactcttcctccgtcgcgcgatgaacttaccaagaaccaggtcagtctgacttgtctggtgaaggggttttacccaagcgacatcgcagtggagtgggaatccaatggtcagcctgagaataactataagactaccccacccgtgctggattcagatgggtcatttttcctgtactccaaactgaccgtggataaatccagatggcaacagggaaacgtcttttcgtgctccgtgatgcatgaagcactccataaccattacacccaaaagagcctctcgctttcgcctggtaaa

SEQ ID NO: 16008 - DNA, 1425 bp, synthetic construct
  misc_feature 1..1425: note = source = /note="Description of Artificial Sequence: Synthetic coding sequence"
  source 1..1425: mol_type = other DNA
atggcagtgatggcaccacgcaccctcgtcctcctcctcagtggtgctcttgcattgacccagacctgggcacaggtacaactccagcaacccggtgccgagctggtgaagccaggcgccagcgtgaagatgtcatgcaaggcttctggttacaccttcacttcttacaacatgcactgggtgaaacagacacctggtcgcggtctcgagtggatcggcgccatttatcctggcaatggcgacacctcatacaatcagaagttcaagggcaaagctacactcacagccgacaaaagcagctctactgcttacatgcaactctcctctctgacttctgaggactcagctgtgtattactgcgctagatccacttactatggcggtgactggtatttcaacgtatggggagctggtaccactgtgaccgtatccgccgcttctactaaaggtcctagcgtgttccctttggccccatccagcaagtctacctctggcggcactgccgccctgggatgcctggtaaaggattacttcccagaaccagtcaccgtgagctggaattcaggagccctcacatctggagttcacaccttccctgctgtgctgcaatccagtggactgtatagcctctctagcgtcgtcactgtgcctagctcttccctcggtacacagacatatatctgcaatgtgaaccataagccttccaacactaaggtcgataagaaggtcgaacctaaatcttgtgacaaaactcacacctgcccaccttgccccgcccctgaactgctgggcggtccctccgtgttcttgtttcctcctaaacctaaggacacactgatgatttctagaacccctgaagtgacctgcgtcgttgtcgatgtctctcacgaggaccccgaggttaagtttaactggtacgttgacggcgttgaagtgcataatgcaaagacaaaacccagggaagagcagtacaactctacatatcgcgttgtgtctgtgcttacagtcctccatcaggactggctgaacggtaaggagtataagtgcaaagtgagcaacaaagcacttccagcccccattgaaaagacaattagcaaagctaagggccaacctagggaaccccaggtctatacactgcccccaagtcgcgacgaactcacaaagaaccaggtgtcactcacctgtttggtgaagggtttctacccttctgacatcgctgtggaatgggaaagcaatggtcaacctgaaaacaactacaagacaacccccccagtgctggatagtgacggaagtttctttctctacagcaagctcacagtcgataaatctaggtggcaacagggtaacgtgtttagctgctctgtgatgcacgaagctctgcataatcactacacccagaagtcactcagtctgtctccaggcaag

SEQ ID NO: 16009 - DNA, 1425 bp, synthetic construct
  misc_feature 1..1425: note = source = /note="Description of Artificial Sequence: Synthetic coding sequence"
  source 1..1425: mol_type = other DNA
atggccgtcatggccccaagaacactggttctccttctctcgggcgccctggccctaacccaaacttgggcccaggttcagctccagcagccgggagcagagctcgtcaagcccggcgcaagcgttaagatgagctgcaaggcatcaggctacacttttacctcctacaacatgcattgggtgaagcagacgccaggccgtggcttagagtggataggggccatctaccctggcaacggcgacacctcctacaaccagaagttcaagggcaaggcaacactgactgccgacaaaagtagctctaccgcctatatgcagttaagctcccttacaagtgaagactccgctgtgtattattgtgcacggtctacttactacggtggcgactggtacttcaacgtgtggggcgcaggcacaacagtcactgtgtctgccgctagcactaagggcccctctgtcttcccgctggcacccagtagcaagtctacaagtggcggtacggctgccctgggctgccttgtgaaggattacttccctgagcccgttaccgtgagctggaacagcggagcattgactagtggagtccatactttccctgccgtgctgcaatccagcggcctctatagcctatccagcgtggttactgttccctcctcctctttaggcacacagacctacatctgcaacgtaaatcacaaaccgtctaacaccaaagtagataaaaaagtggaaccaaagtcgtgtgacaagacgcacacatgtcctccttgcccggcacccgagctcctgggagggcccagcgtttttttgtttccccctaaacctaaagatacattgatgatcagtaggactcccgaggtgacttgtgttgtggtggacgtgtcccatgaggaccccgaagttaagttcaattggtacgttgatggagtggaggtccacaacgccaagacaaaacctagggaggaacagtataactcaacttaccgcgtagtttccgtgctgaccgtgttgcaccaagactggctgaatggtaaggagtataagtgcaaggtgtccaacaaagcactgcctgcccctattgagaagactatcagtaaggctaaggggcagccccgcgaaccccaggtttatactttgccaccctccagagatgagctgacaaagaatcaggtcagcctaacctgtctagtgaagggcttttacccgtcagacatagccgtggagtgggaatcaaacggacaacccgagaacaattacaagaccacaccacccgtgcttgatagcgacggatcattcttcctttactctaagctcacggtggacaaatctagatggcagcaggggaatgtatttagttgctcggtcatgcatgaagcactccataaccattacacccaaaagtctctatcccttagccccggcaaa

SEQ ID NO: 16010 - DNA, 1425 bp, synthetic construct
  misc_feature 1..1425: note = source = /note="Description of Artificial Sequence: Synthetic coding sequence"
  source 1..1425: mol_type = other DNA
atggcagtgatggcccctcgtacccttgttcttctactaagcggagcactggctcttactcaaacgtgggctcaagttcagttacaacagccaggtgctgagctggtgaaaccaggtgcttctgttaaaatgtcgtgcaaagcaagcggttatacattcacaagttacaatatgcactgggttaaacagacccctggacgtggtttagagtggattggagcaatctacccaggtaacggagatacttcttataaccagaagttcaaaggcaaagccacattgactgccgataaatccagttcgactgcttatatgcagctgtcctcccttacttcggaagattcagccgtttactactgcgctcgtagtacctattacggtggtgattggtatttcaatgtttggggagcagggacaacagtgactgtcagcgctgctagtacgaagggcccaagcgtctttccactcgctccttcaagcaagagtacgtccggtggtactgcagcccttggttgtttggtaaaggattattttcctgaacctgtcacagtgagttggaatagcggagccctgactagtggtgttcataccttccctgccgtgctacaatcttctgggctgtactccctttcatctgttgttactgtcccatcgagctccttgggtacccaaacctacatctgtaatgtaaaccacaagccatctaataccaaggttgacaaaaaggttgagcctaaaagttgcgacaaaacacacacttgtccaccttgccctgcccctgagcttctgggaggtccatctgtgttcttattcccgcctaagcctaaggatactttgatgattagcagaacgccagaagtgacatgcgtggtcgtggatgttagccatgaagatcctgaggtgaaatttaactggtacgtagatggtgtcgaagttcataacgcaaaaactaagcctcgagaagaacagtacaattcaacgtatcgtgttgtatccgttctcactgtactccaccaggattggctcaacggtaaggaatataagtgcaaggtatcaaataaggcgcttccagctccaatcgagaagaccatttccaaagccaaaggtcaacctagggagcctcaggtttatactttgcctccttctcgtgatgagctgacgaaaaatcaggttagtctcacgtgcctcgttaaagggttctacccaagcgacattgccgttgagtgggaaagtaatggacaacctgaaaacaattacaagacaactcctccggttcttgattcagatggtagctttttcttgtactctaaacttacagtcgacaagtccaggtggcaacagggtaatgtttttagttgcagcgtgatgcatgaagctttgcacaaccattacacccagaagtctctgtccctgtccccaggtaag

SEQ ID NO: 16011 - DNA, 1425 bp, synthetic construct
  misc_feature 1..1425: note = source = /note="Description of Artificial Sequence: Synthetic coding sequence"
  source 1..1425: mol_type = other DNA
atggctgtgatggcccctcgaaccctggtgctcctgctttcgggtgctctggcactgactcagacatgggctcaggtgcagttgcaacagcctggggctgagctggtcaagcctggcgccagcgtcaaaatgtcatgtaaggccagtggatacaccttcactagctacaatatgcactgggtgaagcagacgcctggtagaggactagagtggataggtgccatctatcccgggaatggtgatacaagttataaccagaaattcaaaggcaaggcgacactgacggccgataagtctagctcaaccgcttacatgcaacttagttcccttacctctgaagacagcgccgtgtactattgcgcaagatccacttactatgggggagattggtacttcaacgtttggggggctggcactaccgtcaccgtgagcgccgcatctaccaagggcccaagcgtgttccctttggcaccaagttccaaaagtacaagcgggggcacagccgcacttggctgcttggtaaaagattactttccagagcctgttacggttagctggaactctggagcactcacaagcggggtgcacaccttcccagcagtgttgcagtcttcgggactttactctctgtctagcgtggtgacagtgcctagttcttctttgggcacacagacctacatatgcaatgtcaaccacaagccctccaatacaaaggtagacaagaaggttgaacccaaatcctgcgacaagacgcatacttgcccaccatgccctgcacccgaactgttgggggggccttcagtcttcctctttccgcctaagccaaaagacactctaatgataagtagaacaccagaggtcacctgcgtggtggtcgatgtgtcccacgaggatcctgaagtcaagtttaactggtacgtcgatggtgtggaggtacacaacgctaaaaccaaacccagagaagagcagtacaatagtacttatagagttgttagcgttctgactgtcctgcaccaagactggctgaatgggaaagaatataagtgcaaagtctcaaataaggccctgccagcccctattgagaagacgatctctaaggcaaaaggccagcctcgagagccacaggtgtacacactgcccccatcaagagacgagttaacgaaaaatcaggtctctttgacatgtctggtgaaaggattctacccctctgatatcgcagtggaatgggagtcgaacggacaaccggagaacaattataaaaccacaccacccgtcctcgacagtgacgggtcgttcttcctgtatagcaagctgacagtcgacaaatcaaggtggcagcagggtaatgtctttagctgcagcgttatgcacgaagccctccacaaccactatactcaaaagtccctgagcttgagccctggcaaa

SEQ ID NO: 16012 - DNA, 1425 bp, synthetic construct
  misc_feature 1..1425: note = source = /note="Description of Artificial Sequence: Synthetic coding sequence"
  source 1..1425: mol_type = other DNA
atggcagtgatggcgccccgaactttggtgctccttctgtccggagcactggctcttactcaaacctgggcacaggttcagctgcagcagccgggagcggagctcgtcaaaccgggagcatcagtgaagatgtcgtgtaaggcatcagggtatacgttcacttcgtacaatatgcattgggtaaagcaaacccctggccgcggattggaatggataggtgcgatctaccctggaaatggagatacctcatacaaccaaaagtttaaagggaaggccacccttactgcggataaatcaagttccactgcgtacatgcagctttcctcgctgacctccgaggattcggcagtgtactattgtgccagaagcacgtactacggaggagactggtactttaacgtgtggggcgccggcaccaccgtgaccgtgtcggctgcaagcaccaagggacctagcgtctttccccttgccccttcctcaaagtccacgagcggaggaaccgcagcactggggtgccttgtgaaagattactttcccgagcccgtgactgtgtcgtggaactccggtgcgttgacttcaggcgtgcacacctttcctgcagtgcttcagtcgagcggcctctactcgctttcatccgtggtgactgtgccatcgagcagtttgggtacgcagacctacatctgtaacgtgaatcataagccgagcaacactaaggtggataagaaagttgaacctaagagctgcgacaaaactcatacgtgccctccgtgtccagcaccggaactgcttggcggaccttcggtgtttttgtttccgcctaaacctaaggacaccctcatgatttcacgtaccccagaagtcacctgcgtggttgtcgatgtgtcccatgaagatccggaagtgaagttcaattggtacgtggacggcgtggaagtccacaacgccaagacgaaacctcgggaagagcaatacaattcaacttatagagtggtttcggttctgacggttcttcaccaggattggctcaacggtaaggaatacaagtgcaaggtgtctaataaggccctgcctgccccaattgaaaaaaccatctcaaaagcaaagggacaacctagagagcctcaagtgtacacccttcccccttcacgcgatgagctgaccaagaaccaagtgagcctgacctgtctcgtgaaaggattctacccttccgacatagctgtggagtgggaatcgaacggacaacctgaaaacaattacaagacgactccacccgtgcttgattccgatggcagctttttcctttacagcaagctgaccgtcgataagtcccggtggcaacaaggcaacgtgttctcctgttcggtgatgcacgaagcacttcataaccattacactcagaagtcgctttcactctcccccggaaag

SEQ ID NO: 16013 - DNA, 1425 bp, synthetic construct
  misc_feature 1..1425: note = source = /note="Description of Artificial Sequence: Synthetic coding sequence"
  source 1..1425: mol_type = other DNA
atggcggtgatggctccccgaacattagtgcttttgctgtccggagcactggcacttacccagacatgggcacaggtgcagcttcagcagcctggtgcagagcttgtgaaaccaggggcgtccgttaagatgtcatgcaaggctagcggatacacttttacaagctataacatgcattgggtcaaacagacaccagggagagggctggagtggataggagccatttacccaggcaatggcgatacatcgtacaatcagaagttcaaggggaaggcgactctgaccgccgacaagtcctcttccacagcttacatgcagctgagttctctgacatccgaggacagcgcggtgtactactgcgcgcggtccacctactatggaggtgattggtattttaacgtgtggggtgccggaacaaccgtcactgtatctgccgcatccacaaagggacctagtgttttccctcttgccccgtcatcgaagtccaccagcgggggtaccgcagcactggggtgtctggtgaaagactattttccggaaccagtgacagtgtcatggaattctggagcacttacgagcggagtgcatacattcccagctgtgctccagtcatctggcctgtattcactcagttctgtagtcaccgttccttcaagcagtctgggcactcagacatatatttgcaacgtgaatcacaagccttcaaacacaaaggtggacaaaaaggttgaacctaaaagctgcgataaaacacatacatgtcctccctgtcccgcacccgagctcttaggaggtccatccgtgtttctctttcccccaaaacctaaggacacactgatgatatctcgcacgcccgaagtgacctgcgtggtggttgacgtgagtcacgaagaccctgaagtgaagtttaactggtacgtagacggcgtcgaggtgcataatgcaaagaccaagccacgagaagagcaatataattctacgtatcgggttgtttccgttctgaccgtcctgcaccaagactggctgaacggaaaagagtacaagtgcaaagtgtccaacaaagctttgcctgctccaattgagaaaacgattagcaaagcgaaaggacagcctcgcgagcctcaggtctatactctccctccgagccgggacgagttaacaaagaatcaggtttccctgacttgcctggtcaaaggtttctacccttccgatatcgcagtcgagtgggagtctaacgggcagccagagaacaattacaagacgacacccccggtcctggacagcgacggcagtttctttctgtacagcaagctcacagtcgataagtctagatggcagcagggaaatgtgttctcctgttccgtaatgcacgaggccctccataaccattatacccagaagtctctgtcgctcagtcctggtaaa

SEQ ID NO: 16014 - DNA, 1425 bp, synthetic construct
  misc_feature 1..1425: note = source = /note="Description of Artificial Sequence: Synthetic coding sequence"
  source 1..1425: mol_type = other DNA
atggcggtaatggcgccgcgtacgctggttctgctgctgtctggggccctagccctgacccaaacatgggcacaagtacagctgcagcaacctggtgctgaactggtcaagccaggcgcgagtgtcaaaatgagctgcaaagcgtccgggtatactttcacttcatataacatgcactgggttaagcagaccccgggtcgtggcctggagtggatcggcgcaatttaccctggcaatggcgacacgagctacaatcagaagttcaaaggcaaggccaccctgactgcagataagagcagcagtacagcttacatgcagctctctagcctgacaagcgaggacagcgcggtgtattactgtgcgcgcagcacctattatggcggagactggtatttcaacgtttggggcgcaggtaccacggttactgtgagcgcagcaagcactaagggccccagcgtttttccgctggcaccgtcgtctaagtccaccagcggaggtacggcagccctggggtgtctggtcaaagactattttccagaaccagtgacagtttcctggaattcgggcgcgcttacgagtggtgtacataccttcccagccgtactgcagagcagcggtctgtactcactgagctcggtcgtcaccgtgccgtctagctccctgggcacccaaacttatatttgtaatgttaatcataagccaagcaacaccaaagtggataaaaaggttgaaccaaagagctgcgacaagacgcacacctgtccgccatgtccggcacctgagctgctgggaggccccagcgtcttcctttttcctcccaagccgaaggatacgctgatgatttctcgcacccctgaggttacctgcgtcgtggtcgacgtcagccatgaagatccggaggttaagtttaactggtacgtggatggagttgaggtgcataacgccaaaaccaaaccacgcgaggagcagtacaacagcacttatcgcgttgtttccgtcctgacggtgctccaccaggattggctgaatggcaaggaatataaatgcaaagtatccaataaggccctgccagcacctatcgagaaaactatatctaaagccaaaggtcaacctcgtgaaccgcaggtttacacactgccaccgtcccgtgatgagttaacgaaaaaccaggtcagtctgacttgcctggtcaagggtttttatccaagcgatatcgcagtcgagtgggagagcaacgggcaaccggagaacaactacaagacaaccccccccgttttggatagcgacggaagcttttttttgtactcaaaactcaccgttgataaaagccgctggcagcaaggcaacgtgttcagctgcagcgttatgcatgaagcgctgcacaatcactacacgcagaagtcactcagcctctccccgggtaag

SEQ ID NO: 16015 - DNA, 1425 bp, synthetic construct
  misc_feature 1..1425: note = source = /note="Description of Artificial Sequence: Synthetic coding sequence"
  source 1..1425: mol_type = other DNA
atggcagtgatggcacccagaaccttggtgcttctgctgtctggagcgctggcactgacccagacctgggcacaggttcagctgcagcagccaggtgcagaacttgtcaagcccggagctagcgtgaaaatgagctgtaaggcatccggatatacttttacttcatacaacatgcattgggtgaagcaaactccaggacgggggcttgaatggatcggggcgatttaccctggtaacggcgacaccagttacaatcagaagtttaagggaaaggcgaccctgactgcagacaagtccagctcgactgcatacatgcagcttagctcgctcacttccgaggattccgccgtgtactactgtgcaagatcgacttactacggtggagattggtatttcaacgtctggggcgcgggaaccactgtgaccgtgtccgcggcatcaactaagggcccgtcggtgtttcctcttgctccttccagcaaatcaacctctgggggaaccgcggctttgggatgcctggtgaaagattacttccctgagccggtgactgtcagctggaactcgggtgcactcacgtccggagtgcacaccttccccgcagtcctccaatcttcaggtctttactcccttagctccgtcgtcactgtgccatcaagttcgcttgggacgcagacttacatttgtaatgtgaatcacaaaccttctaacacgaaggtggataagaaggtcgaaccgaaatcctgcgataaaacgcacacctgtcctccctgccctgctccggaactccttggagggccatccgtgttcctgtttcctccgaaacctaaggataccctgatgatatcgcggactcctgaagtcacttgtgtcgtggttgacgtgtcgcatgaagatccggaagtgaagttcaattggtacgtggatggcgtggaagtgcataacgccaagactaagccaagagaggaacaatacaatagcacctaccgcgtggtgtcggtgctgacggtccttcatcaggactggctgaacggaaaagaatacaagtgtaaggtgtccaataaagcacttccggcccccattgagaaaaccatttcgaaggcaaagggccaaccccgggagccccaagtctacacgctgcctccgtcgcgagatgagctgacgaaaaaccaggtgagcctcacctgccttgtgaagggtttctacccatcagacatagcagtcgagtgggaatcgaacggccaacctgagaacaattacaagactacgccacctgtgcttgactccgatggatcctttttcctgtactcaaagctgaccgtggataagtcaagatggcaacaaggcaatgtgttttcgtgttcggtgatgcatgaagcactgcataaccactacactcaaaagagcctttcgctgagtcctggcaaa

SEQ ID NO: 16016 - DNA, 1425 bp, synthetic construct
  misc_feature 1..1425: note = source = /note="Description of Artificial Sequence: Synthetic coding sequence"
  source 1..1425: mol_type = other DNA
atggccgtcatggcccctcgcacgctcgtgctgctgcttagcggagcactggccctgactcagacctgggcccaagttcagctccagcagccaggagcagaactggtgaagccaggggcctcggtgaagatgagctgcaaagcgagcggatacaccttcacttcatacaacatgcactgggtgaaacagactccaggaagagggttggagtggatcggggcgatttacccaggcaacggcgatacgtcatacaaccagaagttcaagggaaaagcgaccctgaccgccgacaagtcctccagtactgcgtacatgcagctctcctccttgacctcggaggactcggcagtgtactactgcgcccgctccacctattacgggggcgactggtatttcaacgtatggggggccggcaccaccgtaactgtgagtgccgctagcaccaagggcccatccgtatttcctctggcaccgtcatcgaagtcgacctctggagggactgccgcactggggtgtctggtcaaggactacttcccagagccggtcaccgtgagctggaactcgggtgcgctgacctcgggagtgcatacgtttcctgcggtccttcaatcctccggactgtactcgctctcctcggtcgtgacggtcccgtcatcgtcactcggcactcagacctatatctgcaacgtgaaccacaaaccttcgaacaccaaagtcgacaagaaggttgaacctaaatcgtgtgacaaaactcacacttgcccgccgtgcccagctcctgaactgctcggaggaccgagcgtgttcctgttcccgcccaaacccaaggataccctgatgatctcgcgaaccccggaggtgacttgcgtggttgtggacgtttcgcatgaagatcccgaggtgaagttcaattggtacgtcgatggtgtggaggtgcacaatgccaagactaaaccgcgagaggagcagtacaattcaacctacagggtggtgagcgtgctgaccgtcctccatcaagattggctgaatggaaaggagtacaaatgcaaggtgagcaacaaggctctgccggcgccgatcgaaaaaacgatctccaaggccaaggggcagccaagagaacctcaagtgtacaccttgcctccctcgcgggacgaacttaccaagaaccaagtttccctgacttgcttggtcaagggattctacccgtcggatattgcggtcgaatgggaatcgaatggacaaccagaaaacaattacaaaactactccaccagtgctcgattccgacggtagctttttcctgtactcaaagctcactgtggacaagtcgcgttggcagcaaggcaacgtcttttcctgtagcgtgatgcacgaagcacttcacaatcactacactcagaagagcctctcgctgtcaccgggaaag

SEQ ID NO: 16017 - DNA, 1425 bp, synthetic construct
  misc_feature 1..1425: note = source = /note="Description of Artificial Sequence: Synthetic coding sequence"
  source 1..1425: mol_type = other DNA
atggcagtcatggcacccagaacgctcgtgttgttgttgtccggcgctctggcgctcacacagacatgggcacaagttcagctgcagcaacctggcgctgagctggtcaaacccggcgcctctgtgaagatgtcatgtaaagcctccggctatacattcacaagttataatatgcactgggtaaagcagactccgggcaggggactcgagtggattggggccatttaccctggtaacggtgatacgagctacaatcagaagtttaagggaaaagctacgcttactgcagataaaagcagctcaaccgcatatatgcagctctcatccctgacctcagaagacagcgctgtctattattgtgcacggtccacctattacggaggtgactggtactttaatgtgtggggggccggtaccactgttaccgtctcagcggcctccaccaagggaccttccgttttccctcttgctccttcaagtaaaagcacaagtggaggtaccgccgccctcggttgtctggtgaaggattactttcctgaaccagtcacggtgtcatggaacagtggagccctgacgtccggagttcacacttttcctgcggttctgcagtccagcggactgtattcactgagcagcgtcgtaacagtcccatccagctccctcggcactcagacatacatttgtaacgtgaaccacaaaccatctaacaccaaggtcgacaagaaagtggaaccaaagtcctgtgataagacccacacctgtccgccatgccccgctcccgaactgctggggggacccagtgtgttcctcttcccccccaaacccaaagatactctgatgatcagcagaaccccggaggtcacctgcgtggtcgtggatgtttcccatgaggaccccgaggtgaagttcaattggtacgttgacggagtcgaagtccataatgctaagacaaaacctagagaagaacagtacaattcaacttaccgcgtggtgtctgtgttgacagtgttgcaccaggactggctcaacgggaaggagtacaaatgcaaggtcagcaataaggccctccctgcacccattgaaaaaaccattagcaaagctaagggccaaccccgagagcctcaggtgtacactctgcctccaagcagggacgagttgacaaagaatcaggtaagcctcacctgtctggtgaagggtttttacccatccgatatcgctgtggaatgggaatccaacggccagcccgagaataactacaaaactaccccgcccgttctggatagcgacggttccttcttcttgtactctaaactcaccgtcgataaatctagatggcagcaggggaacgttttttcctgctctgtcatgcacgaagcactgcataaccactacactcagaagtctctgtcattgtcaccaggaaaa

SEQ ID NO: 16018 - DNA, 1425 bp, synthetic construct
  misc_feature 1..1425: note = source = /note="Description of Artificial Sequence: Synthetic coding sequence"
  source 1..1425: mol_type = other DNA
atggcggtcatggctcctagaacactggtgctgctgctgtcgggagccttggccctgacacaaacctgggcacaggtgcagttacagcagcccggcgcggaactggttaagcctggcgcctctgtgaaaatgtcatgtaaggccagtggatatacattcacgtcatacaacatgcactgggttaagcagacaccgggacggggtcttgaatggatcggcgcgatttacccgggcaacggggacacatcttataatcagaagttcaagggcaaggccacgcttacggcggataagtcttccagcaccgcatatatgcagctgagttccctgaccagtgaggattccgctgtgtattactgcgctcgcagcacatattacgggggggactggtacttcaacgtttggggagccgggacaacagttactgtgagtgccgcctcaaccaaaggaccttctgtcttccctcttgcacccagcagcaaaagcacgtccggcggtaccgccgccctgggttgcctggtgaaggattacttcccggaaccagtcacggttagttggaactctggcgccttgacatctggagtacacacatttccagctgtgctgcagagtagcgggttatactccctgagcagtgtggtcacggtgccgagctcctcactaggaactcaaacatacatctgtaatgtgaatcacaaaccatctaatacgaaggtagacaaaaaggtggagccaaaaagttgcgacaagacccatacttgccccccctgccccgcgccagagctgctgggtgggccttcggtctttcttttcccccctaaacctaaggatactcttatgatctcacgtacgcctgaagtgacatgcgtagtggtcgacgtatctcacgaggacccagaggtgaagttcaactggtatgtcgacggagttgaagtccacaacgccaaaaccaaacctagggaagaacagtacaacagtacatacagggtagtgagcgttttgactgttcttcaccaagactggcttaatggaaaagaatacaagtgcaaggtctcgaacaaggcattgccagcccctattgagaagaccatctcgaaagccaaaggacagcccagggaaccacaggtctatacgctgcctccttccagagatgaactgacaaagaatcaggtcagcttgacatgcctggttaaaggcttctatccctcagatatcgcagtggagtgggaatcgaacgggcagcccgagaataattacaaaaccacccctccagttctggatagtgacggctccttctttctttactccaaactaacggtggataagtcaaggtggcagcagggcaatgtgtttagttgtagtgtgatgcacgaggctctccacaaccattatacgcagaagtccctgagcctgtcccccggaaag

SEQ ID NO: 16019 - DNA, 1425 bp, synthetic construct
  misc_feature 1..1425: note = source = /note="Description of Artificial Sequence: Synthetic coding sequence"
  source 1..1425: mol_type = other DNA
atggccgtgatggcgcctcgcacactcgtcctgctgctgtccggagcgctggccttaacacagacatgggcccaagtacagctgcaacagccaggcgcagagctagtaaagccaggggcctccgtgaaaatgagctgtaaggcttccggctatacattcacttcttacaacatgcactgggtgaaacagactcccggacggggcttggagtggattggtgcgatatatccaggaaatggcgacacctcttataaccagaaatttaaagggaaagccacgcttactgcggacaaaagcagttcaacagcttacatgcagctaagttctcttacatccgaagactcagctgtgtattactgtgctcgaagcacatactatgggggtgattggtattttaacgtttggggcgcaggtactacagtcacagtatcagcagcaagcacgaaagggccaagtgttttcccccttgccccatcatccaaatccacctcagggggcactgccgccctgggatgtctggtgaaagactattttccggagcctgtcactgtttcttggaattccggcgcactgacctcaggcgttcacactttcccggctgtgttgcagagctctggcctttattcattgtccagcgttgtgactgtgcctagtagttccctgggcacacagacctacatttgcaatgtaaatcacaaacctagcaacaccaaggttgataagaaagtggagcccaaaagctgcgacaaaactcacacgtgtcccccctgcccagctcctgagcttctaggcggcccctctgtgttcctgtttccaccaaaacccaaggataccctgatgatttcgcggacgccagaggtcacatgcgtggtcgtcgatgtgtcccatgaggaccccgaagtgaaatttaattggtatgtagatggagtggaggtacacaatgcaaaaaccaaaccgagagaggaacaatacaactcaacatacagagtcgtaagcgtacttacagtactgcaccaagattggctcaatggaaaagaatacaaatgtaaggtctctaacaaggctctgcctgcaccaattgagaagaccatctctaaagctaaaggccaaccacgcgagcctcaagtctacacactgcccccgtcacgtgatgaactaacaaagaatcaggtctctttaacttgtctagtgaagggattctatccctccgatatagctgtcgaatgggaatccaatggccagccagaaaacaactacaagactactcctcctgtcctggactcggacggatcgttcttcctgtactctaaattgactgtagacaagagtaggtggcagcagggcaacgtctttagttgctcagtcatgcatgaagcgcttcacaatcactacacccagaagagtctcagtctgagcccgggtaaa

SEQ ID NO: 16020 - DNA, 1425 bp, synthetic construct
  misc_feature 1..1425: note = source = /note="Description of Artificial Sequence: Synthetic coding sequence"
  source 1..1425: mol_type = other DNA
atggctgtgatggcaccccgaaccctcgtccttctgcttagtggagccctggcgttgacccagacctgggcacaagtgcaactgcagcaacctggtgctgagctcgtgaagccaggcgcttccgtgaagatgagctgtaaggcctccggctatacttttacctcttacaatatgcattgggtcaagcaaactcctggacggggtctggagtggataggtgcaatctaccccggcaacggtgatacctcatataatcagaagtttaaaggaaaggctactctgacggcggataaatcatccagcaccgcatacatgcaactgtcttctctgacaagcgaagacagcgctgtgtattactgtgctcggagcacatactatgggggcgattggtacttcaatgtctggggggcgggcacaacggtcactgtctcagctgcttcaacaaagggcccctcagtgttcccattggctcccagttccaagagcacaagcggcggcactgcagctcttggctgcttggtgaaggactatttccccgagcctgtgaccgtcagctggaatagcggagccctgacaagtggagtacataccttcccagctgtgctccaatccagcggattgtatagcctgtcctctgtagtgacggtgccgtctagctccttgggcacacagacatacatctgcaatgtgaatcacaagcccagcaacaccaaagtggataagaaggtggaacctaagtcttgcgataaaactcacacctgcccgccctgtcccgcacctgaattgctcggtgggccatcagtcttcttgttcccacccaagcccaaggataccctgatgatttcccggactcctgaggtgacctgcgtggttgttgacgtgagtcacgaagatcctgaggtaaagtttaattggtatgtggatggggtagaggtacataatgccaagaccaagcctagagaggagcagtacaactcaacctaccgggttgtgtccgtcctgacggtattgcatcaagattggcttaatggcaaggagtataaatgcaaggtgtctaataaagcactcccagctccaattgaaaagacaatctccaaggctaagggacagcctcgagagccccaagtgtatacgctgccgccatctagagatgagctcacaaagaatcaggttagtctgacttgccttgtaaagggcttctatccctctgatattgcagtggaatgggagtctaatggccagccggaaaacaattacaaaacgaccccgccagtgctggattcagatgggtcctttttcctgtattccaagcttaccgttgataagagtagatggcagcagggcaacgtgttctcctgctccgtcatgcacgaggccctgcacaatcactacacacagaagtctctgtccctcagtcccgggaag

SEQ ID NO: 16021 - DNA, 1425 bp, synthetic construct
  misc_feature 1..1425: note = source = /note="Description of Artificial Sequence: Synthetic coding sequence"
  source 1..1425: mol_type = other DNA
atggccgtgatggccccccgcaccctggtactcttactctccggagctctcgccctgacacaaacatgggcacaggttcagctgcagcagcccggagcagagctggtgaagcccggggccagtgtgaaaatgtcttgcaaagcaagtgggtatacattcacctcttataacatgcactgggtgaagcagaccccaggccgcggcttagaatggataggcgccatctacccgggcaacggtgacacctcctataaccagaaattcaaagggaaggcaacattaaccgccgataagagttcttctaccgcctatatgcagctgagcagcctgacaagcgaagactctgctgtctattactgcgcccgttccacatactacggcggggattggtattttaacgtgtggggtgctggcactactgtaactgttagtgctgcaagcactaaaggtccatctgtattcccccttgccccttcatccaagtctacatccggcggtaccgctgcattgggctgtttggtcaaggactacttcccggagcccgtgaccgtgtcttggaatagtggcgccctaactagcggagttcacaccttccccgctgtgttacagagctcaggactgtatagcctgtcctctgttgtaacagtacctagctccagcctgggcacacagacctatatctgtaacgtgaaccacaaaccctctaacaccaaggtggacaaaaaggtggaacctaagagctgtgataaaacccatacatgccctccttgcccagcacccgaactcctgggcggaccaagcgtgttcctgttccctcccaagcccaaggatactctgatgattagtcggacccctgaggttacttgcgttgtggtggacgttagtcatgaggatccagaggtgaagtttaactggtacgtggatggagtggaagtgcacaatgccaaaaccaaacctagggaagagcaatacaacagtacttatcgtgtggtgtccgttctcaccgttctgcatcaagattggcttaatggcaaagagtacaagtgtaaggttagtaacaaagctctccctgcacccatcgagaaaaccattagtaaggcaaagggacaaccacgggaaccccaggtatatactttgccaccctccagggacgagctaacaaaaaaccaggtgagcctaacttgcttggtgaaaggtttctatcccagcgacattgccgtcgaatgggaatctaacggtcagcctgagaacaattacaagaccactccacctgtactcgactccgacggctcctttttcctctatagcaagctcactgtcgataagagtcggtggcagcaggggaatgtctttagctgctctgtgatgcatgaggccctccacaatcattatacacagaagtctttgagtctctctccagggaag

SEQ ID NO: 16022 - DNA, 1425 bp, synthetic construct
  misc_feature 1..1425: note = source = /note="Description of Artificial Sequence: Synthetic coding sequence"
  source 1..1425: mol_type = other DNA
atggctgtgatggcgccaaggaccctagtactgttacttagtggtgcgctggcattaacccagacctgggcccaggtgcagcttcagcagccgggggccgaactggtaaaaccaggagcctctgttaaaatgagttgtaaagcttctggatataccttcacctcttataacatgcactgggtgaaacagacgccaggaaggggactggagtggatcggcgccatctatcccggaaacggagataccagttataaccaaaagttcaagggaaaagccacattgacagccgataagtcttcatctacagcttatatgcagctctcctccctgacaagtgaggactctgccgtatattactgtgctagaagcacctattacggaggagactggtattttaatgtgtggggagcaggcacaactgtgaccgttagtgctgccagcacaaaaggaccaagtgtcttccctctggccccctcttctaaaagcactagtgggggcaccgctgcccttggctgcctcgtcaaggactactttcctgagccggtcaccgtgagttggaatagcggagccctgacttccggcgtgcacactttcccagctgttttgcagtccagcgggctgtattccctgtctagtgtggtcaccgtgccttcatccagcctgggaacacagacttatatctgcaacgtgaatcataagccctctaatacgaaggtggacaagaaagtggagcctaagagttgcgataaaacccacacttgccctccttgtcccgcgccggaactgctagggggcccctcagttttcttatttccccccaaacctaaagacacactgatgatcagtagaacccccgaagtgacttgtgttgttgtggacgtgtctcacgaggaccctgaggttaaatttaactggtatgtggacggagtagaagtgcacaatgctaagaccaagcctagggaagaacagtataattccacctatagggtggtgtcggtgttgactgtacttcatcaagattggctgaacggtaaagaatataaatgcaaagtttcaaataaggccctgcctgctcctatcgaaaagaccatctccaaagccaagggacagccccgcgaaccacaggtctacactctaccaccgagccgcgacgaactgacaaagaaccaagtgtccttgacttgtctcgttaaagggttctatcccagcgatattgcagtagaatgggagtcgaacgggcagcccgagaataactataagacgactcctccagtgctagactcagacggcagctttttcctttactccaagcttactgtggacaaatcaaggtggcaacaggggaatgtgttttcctgttccgtcatgcacgaagcattacataaccattacactcagaaatccctgtctctctcacccggtaag

SEQ ID NO: 16023 - DNA, 1425 bp, synthetic construct
  misc_feature 1..1425: note = source = /note="Description of Artificial Sequence: Synthetic coding sequence"
  source 1..1425: mol_type = other DNA
atggcagtgatggcgccgcgcaccttggtgctgctcctgagcggcgcactcgctcttacccagacgtgggcacaggtccaactgcagcagccgggagcggaactggtgaagcctggagcttcagttaagatgtcgtgcaaggccagcggatatacctttacttcatacaacatgcattgggtcaagcaaacgccgggacgcggactggaatggatcggggcaatctaccctggcaatggcgacacttcctacaaccagaagttcaaggggaaggcgacgcttacggcggacaagtcgagctccactgcctatatgcaattgtcatctctcaccagcgaagattccgcagtttactactgcgcgcggtccacttactacggaggtgactggtacttcaatgtgtggggggctggtaccactgtgaccgtgtcggccgcctctaccaagggaccttcggtgttcccgctggctccctcttccaagtctacttcgggaggaactgccgcactgggctgtctggttaaggactacttccccgagccagtcactgtcagctggaacagcggagcactcacttccggcgtccacaccttcccggccgtcctccagagctcaggcctgtactcgctgagctccgtggtgacggttccctcctcgtccttgggaacccagacgtacatctgcaacgttaatcacaagccaagcaacaccaaagttgacaagaaagtcgagccgaaatcgtgcgataagacccatacttgcccgccgtgtcccgccccagaactcttgggcgggccttccgtgttcttgttcccgcccaaaccaaaggatactctcatgatcagccgtactccggaggtgacctgcgtcgtcgtggacgtgtcccacgaggacccagaagtcaagttcaactggtatgtggacggagtggaagtgcacaacgccaaaactaaaccgcgggaggaacaatacaatagcacctaccgcgtcgtgagcgtgctgacggtcctccatcaagattggctgaacggaaaggagtacaagtgcaaggtgtcgaacaaggcgcttccggcgcctattgaaaaaactatctcgaaggccaagggtcagccacgggaaccgcaggtgtacactctgcctccttctagggatgagttgactaagaaccaggtgtcattgacctgtctggtcaaagggttctacccttcggatatcgctgtggaatgggagtccaatggccaacccgagaataactataagaccaccccaccggtgttggactcagacggatccttctttctttactccaaattgaccgtggacaaatcaagatggcagcagggaaatgtcttttcctgcagcgtgatgcatgaagccctgcacaaccactacacccaaaagtcgctgtcactgtccccgggtaaa

SEQ ID NO: 16024 - DNA, 1425 bp, synthetic construct
  misc_feature 1..1425: note = source = /note="Description of Artificial Sequence: Synthetic coding sequence"
  source 1..1425: mol_type = other DNA
atggccgtgatggcacctcgtacattagtcctgctgttgtccggcgcccttgccctcacacaaacctgggcccaagtccagctccagcagcccggcgcagaactggtcaaaccaggagccagcgtaaagatgtcgtgcaaggcgagtggttatacttttacctcctataatatgcattgggtaaaacagacacctggcagaggcctcgaatggattggggcgatttatcccgggaatggggatacctcctacaatcaaaaattcaaaggcaaggccaccctgacggcggataagagtagctctacggcatacatgcagttaagttcgttgacctcagaggattccgctgtgtattattgtgcaaggtctacatactacggaggggactggtacttcaatgtatggggagctggaactaccgtgaccgtttcggctgcctctactaaaggacccagtgtgttccccctggccccaagcagtaagtcaacatccggaggcacagccgccctgggttgtcttgttaaagattatttccccgagccggtgacagtctcctggaattcaggagctcttacttctggtgtgcacaccttcccggcagtgctgcagtcgagtgggttatacagcctgagctctgtagtcaccgttccatcctcgtctttggggacccagacatatatttgtaatgtgaatcacaaaccctccaacacaaaagtggataagaaagtcgagcctaagtcatgtgataaaacccacacatgtcctccatgcccagccccggagttactgggggggccaagtgtgttcctttttccacccaagcccaaggataccctcatgatttctcgtacacccgaggtcacatgcgtcgtcgttgacgtcagtcacgaggatcccgaagttaaattcaactggtatgtggatggtgtcgaggttcataacgccaaaactaagccaagagaggagcaatacaacagcacatacagggtggtgtcagtgctcactgtgctccaccaagactggctaaatgggaaggaatacaagtgtaaagtctctaataaggcccttcccgcccccattgagaagaccattagtaaggcaaaagggcagcccagggaaccccaagtctacactctccctcccagtagggacgagctgactaagaatcaggtgtcactgacctgtttggtgaaaggtttttatccctctgacattgctgtagagtgggagtctaatggccagccagaaaataactacaaaacgacccctccagttttggacagcgacgggtcgttcttcctgtattccaagcttacagttgacaagagcagatggcagcagggaaacgtattttcctgtagtgtcatgcacgaggccctgcataaccattatacacagaagtccttaagtcttagtcctggaaaa

SEQ ID NO: 16025 - DNA, 1425 bp, synthetic construct
  misc_feature 1..1425: note = source = /note="Description of Artificial Sequence: Synthetic coding sequence"
  source 1..1425: mol_type = other DNA
atggctgttatggctcctagaactttggtccttttactttcaggagcattagctttaacacaaacatgggctcaagttcaattacaacaaccaggtgctgaattagtaaaaccaggagctagtgtaaaaatgtcttgcaaagcttcaggttatacctttacttcatacaatatgcattgggttaaacaaactccaggaaggggtttagaatggattggagctatttatccaggaaatggagatacatcatacaatcaaaaatttaagggaaaagcaacactaacagctgataaatcatcttctacagcttatatgcaattatcatcattaacatctgaagattctgcagtttattattgtgctagatctacttattatggtggagattggtattttaatgtatggggtgccggtacaactgttacagtatctgcagcaagtaccaagggaccatcagttttcccattagctccatctagtaagagtacttcaggaggaactgctgctttagggtgtttagtaaaagattattttccagagccagttactgttagttggaattcaggagctttaacttcaggtgttcatacatttccagcagttttacaatcaagcggattatattcattatctagtgttgttactgttccatcatcttctttaggtacacaaacatatatttgtaatgttaatcataaaccatctaacacaaaagttgataaaaaggttgaaccaaaatcatgtgacaaaacccatacatgtcctccttgtccagctcctgaattgttaggtggaccttcagtatttctttttccaccaaaacctaaagatactttaatgatttcaagaactccagaagtaacatgtgttgttgttgacgttagtcatgaagatcctgaagttaaatttaattggtacgttgatggtgtggaagttcataacgcaaagacaaaaccaagagaagaacaatataattcaacatacagagtggtgtctgtattaactgttttacatcaagattggttaaacggaaaggaatataaatgcaaagtttctaataaggcacttccagctcctattgaaaagacaatttctaaagcaaaaggtcaacctagagaacctcaagtttatactttgcctccttcaagagatgagcttacaaaaaatcaagtttcgttaacatgtttagtaaaaggattttacccatcagatattgcagttgaatgggaatcaaatggacaaccagaaaataattataaaacaactccaccagtattagatagtgacggatcattttttttatattcaaaattaacagttgacaaatcaagatggcaacaaggaaatgtattttcatgttcagttatgcatgaagctcttcataatcattatacacaaaaatcactttcactttctccaggaaaa

SEQ ID NO: 16026 - DNA, 1425 bp, synthetic construct
  misc_feature 1..1425: note = source = /note="Description of Artificial Sequence: Synthetic coding sequence"
  source 1..1425: mol_type = other DNA
atggcggttatggcccccaggacgctggtactgctactgagcggagctctcgctctgacccagacctgggcacaggtgcagcttcagcagcctggagccgaactggtgaagccaggtgcaagtgtaaaaatgtcttgcaaggcgtcagggtacaccttcacttcctacaatatgcattgggtgaaacagactcccggaaggggtctggaatggattggcgcaatatatcccggtaatggggatacttcctataatcagaaattcaaaggtaaggcaactctcaccgctgacaaatcctcatctacagcttatatgcagctttcatctttaacctcggaagattcagcagtctattattgtgccagatccacatactacgggggggactggtacttcaatgtctggggcgcaggcacaacggtgacagtttctgccgcgtctacaaaaggaccatccgtatttcctctggcaccaagtagtaagtcgacctccggggggacggccgccctgggttgcctggtgaaagactactttcctgaacccgtgactgtaagctggaactctggcgccctgacaagcggagtgcacactttcccagccgtactccaatcctccggactgtacagtctatctagtgtagtgaccgttcccagtagctctttggggactcagacatatatctgtaatgttaatcacaaaccctcaaacaccaaagtagacaagaaggtggaaccaaagagctgcgacaagacccacacgtgcccgccatgtccggctcccgagttgctaggtggcccgtcggtgttcctgtttccccctaagccaaaggatacactcatgatctcgagaactcctgaggtcacgtgcgtcgtggttgatgtgtcccacgaagacccagaagtgaagttcaactggtacgtcgatggggtcgaggtgcacaatgcaaaaactaaaccccgcgaggagcagtacaactcaacttacagggtcgtgtccgtcctgaccgtcctgcatcaagactggctgaatgggaaagagtataagtgcaaagtgtctaacaaggctcttcccgccccaatcgagaagaccatctccaaggccaagggccagccccgcgagcctcaggtatatactctgccacctagtcgagatgaattgactaagaaccaagttagcttaacctgtctggtgaaagggttttacccttccgatattgccgttgaatgggaatccaacgggcaacccgagaataactataagacaacacccccggtgctggatagcgacgggtccttttttctgtattctaagttgacagtcgacaaatctcgctggcagcagggaaatgtttttagctgtagcgttatgcacgaagcgctgcacaatcactatactcagaaatcactgtccttgagccccggcaaa

SEQ ID NO: 16027 - DNA, 1425 bp, synthetic construct
  misc_feature 1..1425: note = source = /note="Description of Artificial Sequence: Synthetic coding sequence"
  source 1..1425: mol_type = other DNA
atggccgtcatggcgcccaggaccctcgtactgttactgtctggcgcactcgccctcacacagacttgggcccaggttcagcttcagcagcctggggcggagctggtcaagcccggtgcctcggtgaagatgagttgtaaggcttccggatacacttttacttcgtacaacatgcattgggttaagcagacgcctggtaggggactggaatggatcggcgccatatatcccggtaacggcgacacgagttacaaccaaaagttcaagggaaaggctaccttgactgctgataagtcttcttcgactgcctacatgcagctcagttccctgacttccgaggactctgccgtctactattgtgctagatctacctactatggtggagactggtacttcaacgtgtggggcgcaggaacgactgtgaccgtctctgccgctagcacaaaaggccctagtgtattccctctcgccccatcttctaagtccacgtcaggggggacagccgccctgggatgtctggtgaaagactattttccggagccagtcacagtcagttggaattctggcgcactcacgtcaggcgtccacacttttccggctgttttgcagtcctccgggctatattctctatcttccgttgtgactgtgccgagttcttccttaggaactcaaacctatatctgcaacgtgaatcacaagccatcaaacacaaaggtggataagaaagtcgaaccaaaatcttgtgacaagacccatacctgccctccatgccccgcccccgaactactcggcggaccttctgtattcctattccccccgaagcctaaggacacgctaatgatatctcgcactccggaggtaacatgcgtggtggtggatgtgtcacacgaagatcccgaggtcaaattcaattggtacgtagatggcgtggaggtgcacaacgccaaaacaaagcccagggaggagcagtataactcaacgtacagagtcgtgtccgttctcaccgttctgcatcaggattggctgaatggaaaggagtacaagtgcaaagtttctaacaaagccttgcccgctccaatcgagaaaactatctctaaggccaaaggccagccccgtgagccacaggtatatacactgcccccatctcgcgatgaactaactaaaaaccaggtgagccttacatgtcttgtaaaaggtttctatcccagtgatattgcagtggagtgggagtcaaacggccagcctgagaacaactataagacaaccccccctgttctggatagcgacgggtcattttttctgtattcaaagctcacagtggataaaagccggtggcagcagggcaatgtgttttcttgcagcgtgatgcacgaagctctccacaaccattacactcagaagagtttgtctttaagtccgggaaaa

SEQ ID NO: 16028 - DNA, 1425 bp, synthetic construct
  misc_feature 1..1425: note = source = /note="Description of Artificial Sequence: Synthetic coding sequence"
  source 1..1425: mol_type = other DNA
atggccgtgatggccccaagaaccctcgtgctgctcctctcgggagccctcgcgctgactcaaacctgggcacaggtccaactccagcaaccgggcgccgaactggttaagcctggagcttccgtgaaaatgtcgtgcaaggcctcgggctacacgttcactagctacaacatgcattgggtgaaacagactccaggccggggactggaatggatcggagctatctaccctggcaatggagacacctcgtacaaccagaagttcaaagggaaagccactttgaccgcggacaagtcgtcgtcaaccgcctacatgcagctgagttcgcttacctccgaggattcagctgtctactactgcgctcggagcacctactacggcggggattggtacttcaacgtctggggagcgggaaccactgtgaccgtgtcggctgcctccaccaaggggccgtcagtctttccgctcgcaccatcatccaagtcgacttccggcggaactgcggcgctgggatgcctcgtgaaagattacttcccggaaccggtcaccgtctcgtggaatagcggagccttgactagcggagtccatacgttcccagcagtgcttcagtcgagtgggttgtactcgttgtcgtccgtggtcacggtgccttcctcatcgctgggaactcagacctacatctgcaatgtgaaccacaagccgtcaaacaccaaagtggacaagaaggtcgaacctaagagctgtgacaagacccacacgtgtccgccgtgccctgccccggaattgctgggcggacctagcgtctttctgttcccgccgaagccaaaggatactctgatgatctcaaggaccccagaggtcacctgcgtggtggtcgatgtcagccacgaggatcctgaggtgaagttcaactggtacgtcgatggcgtggaggtgcacaacgccaagacgaaaccgcgcgaagagcaatacaactcaacctacagagtggtttccgtgctgaccgtgctccatcaggactggctgaatggaaaggagtacaagtgcaaggtcagcaataaggccctgccggccccgatcgaaaagactatttcaaaggcgaagggtcaacccagagagccgcaagtctataccctccctccgagccgggacgaactgaccaagaaccaggtgagcctgacttgtcttgtgaagggattttacccttccgatattgctgtggagtgggaatccaacggacagcctgagaataactataagaccacgccgccggtgctggattcggacggtagcttcttcctctactccaaactcacggtcgacaagtcacggtggcagcagggaaacgtgttctcatgttcggtgatgcacgaagcattgcacaaccattacactcagaagtcactgtcactgtccccgggaaaa

SEQ ID NO: 16029 - DNA, 1425 bp, synthetic construct
  misc_feature 1..1425: note = source = /note="Description of Artificial Sequence: Synthetic coding sequence"
  source 1..1425: mol_type = other DNA
atggctgtgatggcgcctcgcaccctcgtgctcctgctgtccggagcgctcgccctgacccagacctgggcacaggtccaactccagcagcctggcgccgagctggttaaaccaggcgcgtctgtgaagatgagctgcaaagcatcaggctatacatttacctcctacaatatgcactgggtgaagcagacccccgggagaggccttgaatggataggggcaatctacccagggaacggcgatacttcatataaccagaaattcaagggcaaggccactctgaccgctgacaaatcctcctctactgcctatatgcagctcagctccctgactagcgaggactccgccgtctactattgtgctcggagtacatattatggaggcgactggtattttaacgtctggggcgctggaactacagtgacagtgtcagccgcatccactaagggtcccagcgtgttccccctggcgcccagctctaagagcacctctggaggaaccgccgccctgggctgcttggtgaaggactattttccagagcctgtgaccgtaagttggaactcaggcgccctgacctccggtgtccacacctttccagccgtgcttcagtcctctggactgtacagcttgagctctgttgtgactgtgccatccagctcccttgggacccagacctatatatgcaatgtcaaccataaaccctccaacacaaaggtggacaagaaggttgaaccaaaatcctgtgacaaaacacacacttgccctccttgccctgcccccgaactgctgggtggaccttccgtgttcctctttccccctaagccaaaagatacactgatgatttcccgcacacctgaagttacgtgcgttgtggtagacgtctcacatgaggatcctgaggtcaagtttaattggtacgtagatggcgttgaggtgcacaacgccaaaactaaaccaagggaagaacagtataatagcacctaccgcgtggtgtctgtgctgactgtcttgcatcaggactggctgaatggtaaggagtacaagtgtaaagtatcaaataaggctcttcctgcgcccatcgaaaaaacaatcagcaaggccaaaggacagccaagagagcctcaggtctacacactgccacctagcagagatgagctgactaaaaatcaggtgagcctgacgtgtttggtgaaagggttctatccgtcagatatcgccgtggagtgggagagtaacggtcaaccagaaaacaactacaagaccacacccccagttctcgatagtgacgggagcttctttttgtattctaaactgactgtggacaagtccaggtggcaacaagggaacgtgttctcttgctcagttatgcacgaggcgctccataatcactacactcagaagtccctctccctctccccaggcaag

SEQ ID NO: 16030 - DNA, 1425 bp, synthetic construct
  misc_feature 1..1425: note = source = /note="Description of Artificial Sequence: Synthetic coding sequence"
  source 1..1425: mol_type = other DNA
atggcggtgatggcccccagaactctcgtgcttttgctctcgggtgccctggcgctgacgcagacttgggcgcaggtgcaacttcagcagcctggagcagaactggtgaagcctggcgcaagcgtcaagatgtcctgcaaagcatcaggatacacctttacttcgtacaacatgcattgggtgaaacaaactccaggcagaggattggaatggattggcgcaatttaccctggtaacggagatacctcctacaatcagaagttcaaggggaaagcgacccttacggcagacaagtcctcttctaccgcatacatgcagcttagctcccttacctccgaagattccgccgtgtactattgtgcacgctccacgtattacggtggagattggtactttaacgtgtggggggcgggtaccactgtaaccgtgtcagcagcctcaaccaagggtccctcagtgtttcccctcgctccgagctcgaaatcaaccagcggaggaaccgcagcgcttggttgtctggtcaaagattacttcccggaacctgtgactgtgtcgtggaactcaggtgcgctcacctccggtgtgcacacgtttccagccgtgttgcaatcgagcggtttgtactcactctcctcggtcgtgaccgtcccttcgagttctctcggaactcaaacctacatctgtaatgttaaccataagccatcgaatactaaagttgataagaaggttgaacccaagtcgtgtgataagacgcatacttgtcctccttgtccagcaccagaactgctcgggggcccttccgtgtttctttttcctccaaaaccaaaggacactctgatgatttccaggactcccgaagtgacctgcgtcgtggtcgacgtctcccatgaggatccagaagtgaagtttaactggtacgtggatggcgtggaagtgcataacgctaagactaagccgagggaggaacagtacaactcaacgtaccgagtggtttccgttctcactgtgctgcaccaagattggctgaatgggaaggaatacaagtgcaaagtctccaataaagccttgccagcacctatagaaaagacgatctccaaggcaaaaggacaacctagggagcctcaggtatatactctcccaccaagtcgggacgaactgactaagaaccaagtttctcttacctgtttggtgaaaggtttctacccatccgacattgcagtggaatgggaatccaacggccagccagagaacaactacaagactactccacctgtccttgattcggatggatcgttcttcctctactcgaaacttaccgtggacaagtcccgctggcaacagggcaatgtgtttagctgttcggtcatgcatgaggcccttcacaatcactacacccagaagtcactttccctgtcccccggaaag

SEQ ID NO: 16031 - DNA, 1425 bp, synthetic construct
  misc_feature 1..1425: note = source = /note="Description of Artificial Sequence: Synthetic coding sequence"
  source 1..1425: mol_type = other DNA
atggccgtcatggcccctaggacactggtcctcttactgtctggggccctcgcacttacccagacttgggcccaggtgcagctgcagcaacccggggcagagcttgtgaaacccggggcctctgtaaaaatgagctgtaaagccagtggttacacgtttacaagttataatatgcactgggtcaaacagacccccggtcgtgggctggagtggatcggcgccatctatcccggaaacggcgacaccagctacaaccaaaaattcaagggtaaagcaacactaactgcggataagtcatcctctactgcgtatatgcagctgagtagccttacaagcgaggactcagcggtgtactactgtgcgagaagtacctactacggaggggattggtacttcaacgtgtggggtgcggggactacagttactgtgtcagctgcatccacaaagggcccctcagtcttccctctggcccccagtagtaagagtacatctgggggaaccgcagcgctgggatgcctggtcaaagattacttccccgagcctgtcaccgtgtcgtggaactctggtgcacttacaagcggcgttcatacttttccagccgtgctgcagagcagtggtctgtattccctctcttcagtcgttactgtccctagctctagtttgggaacacagacctacatttgtaacgtgaaccataaaccctctaacactaaagtggacaaaaaagttgaacccaaatcgtgtgataaaacccacacttgcccaccctgtcccgcccccgagttgcttgggggaccatccgttttcctatttccacctaaaccaaaggacactctcatgatatcccgtacccccgaagtcacttgcgtcgtagtggacgtcagtcacgaagaccccgaggtgaagttcaactggtatgtggacggtgtggaggtgcacaacgcaaagacaaagccccgggaggaacaatacaacagcacctatcgggtagtttctgtcctgaccgtcttacatcaagattggcttaacggcaaagagtacaagtgcaaagtgtcgaataaggcgctgcctgctcccatagagaaaacaatctctaaagcaaagggacagccccgtgagccacaggtttacaccctgccgccgtcccgggacgaattgacaaagaaccaggtttcactcacctgcctggtgaaaggattctacccttctgacattgccgtcgagtgggaaagcaacggccaacccgaaaataattataaaacgacacctcccgtgctggattccgatgggtctttcttcctctatagtaagctcacggtagataagtcccggtggcagcaaggtaacgtcttttcttgttcagtgatgcatgaagctctgcacaatcactacacgcagaagagcctctctctgtctcctgggaaa

SEQ ID NO: 16032 - DNA, 1425 bp, synthetic construct
  misc_feature 1..1425: note = source = /note="Description of Artificial Sequence: Synthetic coding sequence"
  source 1..1425: mol_type = other DNA
atggctgtgatggccccgcggaccctggtgctcctgttgagcggagctttggccctgactcaaacctgggcgcaagttcaactgcagcagccaggtgccgaactggtgaagcctggcgcgagcgtgaaaatgtcgtgcaaagcctcgggctatactttcactagctacaacatgcactgggtgaagcagactccgggacgcgggctggaatggatcggcgccatctacccggggaacggagacaccagctataatcaaaagtttaagggtaaggcgacgcttactgccgataagtcctcctccactgcgtacatgcagctgtcaagcctcacctccgaagatagcgcagtgtactactgcgcccgctctacgtactacggaggcgattggtacttcaacgtgtggggcgccggaactacggtgactgtgtcagcggcgtcgactaaaggaccttcggtgttccctctggccccgtcgtcaaagtcaactagcggcggaactgccgcgttgggatgcctcgtgaaagactactttcccgaacctgtgactgtgtcgtggaacagcggagccctgacctccggagtccacaccttcccggcggtgctgcagtcgtcggggctgtattctctctcgtcagtggttaccgtgccctcgtcgtcgctcggaacccagacgtacatctgtaacgtcaaccacaagccatccaacactaaggtcgacaagaaagtcgagccaaaatcgtgtgataagacccacacctgtcccccttgcccggcaccggaactgctcgggggaccgtcggtctttttgttcccgccgaagccgaaggatactctgatgatctcccggactccagaggtcacttgtgtggtggtggatgtgtcgcacgaggatccggaagtgaagttcaactggtacgtggacggcgtcgaagtgcataacgccaagaccaaaccgcgggaagaacagtacaattctacgtatcgggtggtgagcgtgcttaccgtgttgcaccaggactggctcaacggaaaggagtacaagtgcaaggtcagtaataaggcactgcccgccccgatcgaaaaaactatcagcaaggcaaaaggtcagccgcgcgaaccgcaggtctacacccttccaccatcccgcgacgagttgaccaagaaccaggtgagccttacctgcctcgtgaagggattttacccatcagacatcgcagtggagtgggaatcaaatgggcagccagagaacaattacaaaaccactccaccggtcctggattcggatggatcgttcttcctgtacagcaagctcaccgtggataaaagcaggtggcagcagggaaatgtgttttcgtgttcggtcatgcacgaggctctccataatcactacactcaaaaatcgctgagcctgtccccaggcaaa

SEQ ID NO: 16033 - DNA, 1425 bp, synthetic construct
  misc_feature 1..1425: note = source = /note="Description of Artificial Sequence: Synthetic coding sequence"
  source 1..1425: mol_type = other DNA
atggccgtgatggccccccgcaccctggttttgttgctctccggtgccctggccctgacgcaaacttgggcgcaagtccaactccaacagccgggggctgagttggtgaagccaggggcatcagtgaaaatgtcatgcaaggcaagcggatacacttttacctcgtacaacatgcattgggtgaaacagactcctggacgggggctggaatggataggagcgatctaccccggaaacggtgatacctcctacaaccagaaattcaaggggaaggcgaccctgaccgcagacaaatcttcgtccacggcatacatgcagctctcctcgctcacgtccgaagactccgccgtctactactgcgctcgctccacctactacggaggagactggtactttaacgtgtggggcgccggcactaccgtgacggtgtccgcggcttccactaaaggcccgtcagtctttccgcttgctccgtcaagcaagagcactagcggaggaacggcggctctcggatgcctggtgaaggattacttcccagaaccagtgactgtgtcgtggaactcgggagcgctgacgtcgggcgtccacacgtttccggcagtgctccaatcgtccggtctgtattcgttgtcatcggtggtgactgtgccgagctcctctctgggaacccagacctacatctgcaacgtcaatcataagccgtcaaacaccaaggtggacaagaaagtggaacccaaatcctgcgataagacccacacctgcccgccgtgcccggcccccgaactcctggggggaccgtcagtgtttctgttcccaccgaaaccgaaagacactctcatgatctcccgcactcccgaagtgacctgtgttgtggtggatgtgtcgcacgaggaccctgaggtcaagttcaactggtacgtcgacggagtcgaggtgcataacgctaaaaccaaaccgagagaagagcaatacaattcgacgtaccgcgtggtgtcggtgctgactgtgctgcatcaagattggctgaacggcaaagagtacaagtgcaaggtgtcgaataaagctctcccagccccgatcgaaaagacgatctccaaggcgaagggacagccgcgggaacctcaagtgtacactcttccgccttcacgggacgagcttaccaagaaccaggtgtcgctgacctgcctcgtgaagggtttctacccgtccgatatcgcggtggaatgggaatcgaacggccagcctgagaacaactacaagaccaccccaccagtgcttgacagcgacgggagcttcttcctgtactcaaagctcactgtggacaagtcacgctggcagcaggggaacgtgttcagctgcagcgtgatgcatgaggccctgcacaatcattacacccagaagtcgttgagcctgtcccctggaaaa

SEQ ID NO: 16034 - DNA, 1425 bp, synthetic construct
  misc_feature 1..1425: note = source = /note="Description of Artificial Sequence: Synthetic coding sequence"
  source 1..1425: mol_type = other DNA
atggccgtgatggcgccccgtacccttgtgttgctgttatcgggggccttggctttaacacagacctgggcccaggtccagctgcaacagccaggggctgaactcgtgaaacccggcgcatccgtgaagatgagctgtaaggcctcggggtatacgtttacctcctacaacatgcattgggtaaagcagaccccaggcagagggttggagtggatcggtgccatatacccaggaaacggagacacgagctataatcagaagttcaagggaaaagccactctgactgcagacaagtccagcagcaccgcctacatgcagcttagctctctgacgtcggaagactctgccgtgtattactgcgcaaggtcgacatactacgggggagattggtatttcaacgtttggggtgcgggaactaccgtgaccgtttctgccgccagtactaagggtccgagtgtgttcccactggcccctagttccaagtccacatccggcggtacagctgccctgggttgcttagtcaaagactactttcctgaacccgtgaccgtgtcgtggaactcaggcgcattgacttcaggggtgcataccttccccgccgtacttcagtccagtggtctttactccctgtcttctgtggtgactgtcccctctagctcacttgggacccagacttatatctgcaacgtcaaccacaaaccctctaacactaaagttgataagaaggtggagcccaaatcctgtgataagactcacacatgtccaccctgccccgctcccgagttattagggggtccctccgtgtttctgtttccccccaaaccaaaagacaccctgatgatctcacgaactcccgaagtgacctgtgttgttgtcgacgtcagtcatgaggaccccgaagtcaaatttaattggtacgtagacggcgtggaggtgcataacgccaagactaagccacgggaggaacagtacaactcgacataccgggtggtgagcgtcctgaccgtattgcaccaggattggctgaatggtaaagagtataagtgtaaagtgagcaacaaggcattgcccgcgccgattgagaagactatctctaaggccaaaggacagcctcgggagccccaggtctacacgctcccgccatcccgggacgaactaaccaaaaaccaggttagccttacatgccttgttaagggcttttatcccagcgatatcgccgtggagtgggagtcaaatggccagcctgagaataattataaaaccacacctcccgtgctggacagtgatggttccttcttcctctactctaagcttacggttgataaaagtagatggcagcagggcaacgtcttctcgtgttccgtcatgcacgaagccctgcacaaccattatacacaaaagtccttgtcccttagtccagggaag

SEQ ID NO: 16035 - DNA, 1425 bp, synthetic construct
  misc_feature 1..1425: note = source = /note="Description of Artificial Sequence: Synthetic coding sequence"
  source 1..1425: mol_type = other DNA
atggccgtgatggccccaagaacactggtgctcctcctgtcgggcgcactggcactgactcagacttgggcccaagtgcaactgcagcagccgggggctgaactggtcaagccaggagcatcagtcaagatgagttgcaaggctagcgggtacacgttcacttcatacaatatgcactgggtgaaacagacccccggccggggcctcgagtggatcggggccatttatcccggtaatggagacaccagctataatcaaaagtttaaagggaaagccacgctgaccgcagacaaatcaagttcaactgcatatatgcagctctcaagtctcacttcagaagacagcgccgtttattactgtgcccgatcaacatactacggcggggactggtacttcaacgtctggggggctggcacgactgtcacagtgtcagcggcgtctaccaagggtcccagtgtcttcccactggctccctctagtaaaagcaccagcggtgggaccgccgctctgggatgtctggtgaaggattactttcccgaaccagtgactgtctcctggaacagtggtgctctgacctctggcgtccatacgtttccagccgtcctgcaatcaagcggtctttactcgttgtcatcagtcgtcactgtccccagttcttcactgggcacccagacctacatttgcaacgtcaaccacaagccaagcaacaccaaggtggacaagaaggtggagcccaagtcttgcgataagacacatacctgccccccatgcccggcccctgaacttctcggaggcccgagcgtcttcctgtttccacccaagcctaaggacaccctgatgattagccgcacccctgaggttacctgtgttgtcgtggacgtgagccacgaagacccggaggtgaagttcaactggtacgtggatggggtggaggtgcataacgcaaagacgaagcctcgggaggaacagtataacagcacctacagagtcgtttctgtcctgaccgtcttgcaccaggactggctgaatgggaaggaatacaaatgtaaagtttccaataaggcgctgcccgcccctattgagaagactatttcaaaggccaagggtcagccacgcgaaccccaggtctacaccttgcccccatcacgagatgagctcacaaaaaaccaggtttccttaacgtgcttggtgaagggattctatccaagcgatattgccgtcgagtgggaatccaatgggcagccggagaataattataagaccacacctcccgttcttgacagcgatgggtctttcttcctgtacagcaaactgacagtagataaaagcaggtggcagcagggcaacgtcttttcttgcagtgtgatgcacgaagccttacacaaccactacacccagaagagcctgtctttatctcctggcaaa

SEQ ID NO: 16036 - DNA, 1425 bp, synthetic construct
  misc_feature 1..1425: note = source = /note="Description of Artificial Sequence: Synthetic coding sequence"
  source 1..1425: mol_type = other DNA
atggccgtgatggcaccaaggactctggtgcttctcctgtcgggagccttggctctcactcaaacgtgggctcaggtccagctgcagcaaccaggagccgagcttgtcaagcccggagcctcggtgaagatgtcatgtaaggcaagtggttacacctttacgtcctataacatgcactgggttaaacagacccccggtcggggcctggagtggattggagcgatctacccaggaaatggggatacctcgtataaccaaaagtttaagggaaaagctaccctcaccgcagataagtccagctcgactgcatacatgcaactttcctcactcacgtcggaggatagcgcagtttactactgtgcacgctcaacctactacgggggtgattggtactttaatgtgtggggggccggtaccactgtgactgtgtccgcagcgtcaaccaagggaccatccgttttcccacttgcaccctcgtcgaaatccacctccgggggtactgcggcactcgggtgtctggtgaaagactactttcctgagccggtgaccgtgtcttggaatagcggcgcactgacctccggagtgcatacgtttcctgccgtgcttcaatcctccggattgtactccctgtcaagtgtagtgactgtgccaagcagctccctgggaacccaaacctacatctgtaacgtgaaccataagccttctaatactaaagtcgacaagaaagtggagccaaagtcatgcgataaaactcacacctgtccgccttgcccagcacccgaattgttgggtggtccatcagtctttttgttcccgcccaagcctaaggatacccttatgatctccaggacgcccgaagtgacctgtgtcgtcgtggatgtgagccatgaggaccctgaggtgaagtttaactggtacgtcgacggcgtggaagtgcacaacgcaaaaacgaagcctcgagaagagcagtacaactcgacctaccgagtggtcagcgttcttacggtccttcatcaggactggctcaatggcaaggaatacaaatgtaaggtgagcaataaggctcttcctgcaccaatagaaaaaactattagtaaggcgaagggccaacctagagaacctcaggtctacaccctgcctcctagccgggacgaacttactaagaaccaggtcagcctgacctgcctggtaaagggattttaccctagtgacattgcagtggaatgggaatccaatggtcaaccggaaaacaactacaagactactccgccagtgctggatagcgatgggtccttcttcctgtatagtaagctcaccgtcgataagtcaagatggcagcaaggcaacgtgttctcctgctcagtgatgcacgaagctctgcataaccattacacgcaaaagtcgctttccctctctcccgggaaa

SEQ ID NO: 16037 - DNA, 1425 bp, synthetic construct
  misc_feature 1..1425: note = source = /note="Description of Artificial Sequence: Synthetic coding sequence"
  source 1..1425: mol_type = other DNA
atggctgtaatggctccaagaacccttgtgttgttgctttcgggtgcgctagctttgacccagacatgggcacaagtgcagctgcaacagccaggggctgaactggtgaagcccggggcaagcgtcaagatgtcgtgcaaggcctccgggtatacattcacaagttacaacatgcattgggtcaagcagaccccggggcgaggcctggaatggattggtgcgatctaccccgggaatggtgatacctcctataatcagaagttcaagggaaaagctactctgacagccgacaagtcctccagcacagcttatatgcaactttcctccctgacatccgaggatagcgcggtttactactgtgcgcgcagcacttactatggaggcgattggtattttaacgtgtggggcgctggcaccaccgtgaccgtgtcagctgcatcgaccaaggggccttctgtgttccccctagccccctcatcgaaaagcacttccggcggaaccgcagcattggggtgtttagtgaaagattatttcccagagccagtcaccgtctcctggaacagtggggctctcacaagcggagtccacacgttccccgccgtgctgcagtcaagcgggttgtactccctgagcagcgtggtcacagttccctcgtcgtcgctcggcacccagacatatatctgtaacgtgaatcacaaaccttccaacaccaaggtagataagaaggtcgagccaaaatcatgcgacaaaacccacacgtgccccccctgtccagctcccgagttgctgggaggtccgtcagtgtttctgttcccacctaagccgaaagacactctcatgatctctcgaactccagaggtgacctgcgtagtggtggacgtctcacatgaagaccctgaggttaagttcaactggtacgtggatggtgtggaagtgcacaacgcgaagaccaagccaagggaggagcaatacaattctacctatcgggtggtctccgtcttgacggtactgcatcaggactggctgaacggcaaagaatacaagtgtaaggtgtccaacaaagccctcccggcccccatagagaagactatctcgaaggctaagggccagccaagagagccacaggtgtatacacttccgccatccagagatgaactgacgaagaatcaggtctccctcacatgcctagtgaaggggttctacccgtccgacatcgccgtagagtgggagagcaatgggcagcctgagaataactataagactactcccccagtgctcgacagcgacgggagctttttcttgtatagcaagctcacggttgataagtccaggtggcaacaggggaacgtcttctcctgttcggttatgcacgaggctctccacaaccattacactcagaaatcattatctctgtcccccggaaag

SEQ ID NO: 16038 - DNA, 1425 bp, synthetic construct
  misc_feature 1..1425: note = source = /note="Description of Artificial Sequence: Synthetic coding sequence"
  source 1..1425: mol_type = other DNA
atggcagtgatggcacctagaacgctggtgcttcttctgtcgggtgccctcgccctcacccagacctgggcgcaagtgcaactccagcagcctggagcagaactcgtgaagccaggtgcaagcgtgaagatgtcatgtaaggcatccggatacactttcacctcttacaatatgcattgggtcaagcagactcctggaagaggactggaatggattggtgccatttatccaggtaacggagacacctcatacaaccagaagttcaaaggaaaggccactctcaccgcagataagtcctcgtcaaccgcgtacatgcaactttcctccctcactagcgaagattcagcagtctactactgtgctagatcgacctactacggtggcgattggtactttaacgtgtggggtgccggaaccacggtcactgtgtcggcagcatccactaaaggaccttcggtctttcctttggccccatcgtcaaaatcgacgagcggtggaacggcagcactcggatgcctcgtgaaggattacttcccagaacctgtgaccgtctcatggaactccggcgcacttacttccggagtgcacacgttccctgccgtgctgcaatcgagcgggctgtactcgctgagctcagtcgtgaccgtgccaagctcatcgctgggaactcagacctacatatgtaacgttaaccataaaccttcaaacactaaggttgacaaaaaagtggaaccgaagagctgtgataagactcacacttgccccccatgccctgcacccgaactcctcggaggaccctccgtctttttgtttcctccaaagcctaaggacactctgatgatttcaagaactccagaagtgacctgtgtggtggttgacgtctcgcatgaagatccagaagtgaagttcaactggtacgtcgatggggtggaggtccataacgcaaagaccaaaccacgagaggagcagtacaattcaacctacagagtcgtctccgtgctgaccgtgctccaccaggactggcttaacggaaaggaatacaaatgtaaggtcagcaataaggcactgcctgcccccatagagaaaactatctcgaaggctaaaggacagcctcgggaaccccaggtgtacacgctgccgccatcacgggatgaattgactaagaatcaggtgtcgcttacctgtctcgtcaaggggttttacccttccgacattgcagtggagtgggaatcgaatggacagccggaaaacaactacaagactaccccgcctgtgctggactctgatggatcgttttttctgtactccaaacttactgtggataaatcgaggtggcaacagggcaacgtctttagctgttcagtcatgcatgaagcactgcataaccattacacgcagaagagcctcagcctgtccccgggcaaa

SEQ ID NO: 16039 - DNA, 1425 bp, synthetic construct
  misc_feature 1..1425: note = source = /note="Description of Artificial Sequence: Synthetic coding sequence"
  source 1..1425: mol_type = other DNA
atggcagttatggcccctcgcacgctggttctcctgctgagtggagccctggcactgacacagacgtgggcccaggtccagctgcagcagccaggcgccgaactcgtgaaaccgggtgccagcgtcaagatgtcttgcaaggcctctggatataccttcacgagctataacatgcattgggtcaaacagactcccggccgcggcttggagtggatcggcgcaatctatccgggtaacggagatacctcctacaaccagaagtttaaggggaaggcaacactcactgctgacaagagttcttcgaccgcttacatgcaattgagtagcctcaccagtgaggatagcgccgtttattactgtgcgcgctccacctactatggaggagactggtatttcaacgtttggggtgccggaacgaccgtgacagtcagcgctgcatccaccaagggcccttctgtctttcctttggccccatcctcgaagtccacctctggaggtaccgccgctctgggctgtcttgtcaaggattacttcccagagcctgtcaccgtctcgtggaactccggcgccttgacctcgggcgtccacacctttcctgccgtccttcagtcttccggtctgtattcgctgagttcagtcgtgaccgtcccatctagctctttgggcacccaaacctacatttgcaacgttaatcacaagccctctaacacaaaggtcgataagaaggttgaacccaagtcctgcgacaagacccatacctgccccccgtgcccggctccagaactgctgggtggcccgagcgttttcctgtttcccccaaagcctaaggataccctgatgatttcgcgcacccccgaggtgacctgcgtggtagtggacgtgagccacgaagatcccgaggtgaagttcaactggtacgtcgatggtgtcgaagtccataacgccaaaaccaagccgcgcgaggagcaatacaactctacgtaccgagttgtgagcgtcctaaccgttctccaccaggactggctgaacggcaaggaatacaagtgtaaggtctccaacaaggctcttccagcccctattgagaagaccatctccaaagctaagggtcaacctcgagagccgcaggtgtacactctgcccccgagtcgcgatgagctcacgaagaatcaggtgtcgctcacgtgtctggtcaagggattttacccttccgatatcgccgtggagtgggagtccaacggccagcctgaaaacaactataagaccacaccccccgtcctagattccgatggcagttttttcctgtacagtaaactcactgtggacaagtctcgctggcagcaaggtaacgtcttctcctgcagcgtcatgcacgaagccttgcataatcactacacccagaaatcgttgagcctttctccgggcaag

SEQ ID NO: 16040 - DNA, 1425 bp, synthetic construct
  misc_feature 1..1425: note = source = /note="Description of Artificial Sequence: Synthetic coding sequence"
  source 1..1425: mol_type = other DNA
atggccgtgatggcacctcgcactcttgtgcttcttcttagtggggcactggcactgacccaaacctgggcgcaggtgcagcttcagcagcccggtgcagaactcgtcaaaccgggagcatcagtgaagatgtcctgtaaggcatcagggtatacctttacgtcatacaacatgcattgggtgaaacaaactcccgggcgaggtcttgagtggatcggggcaatataccctggaaacggagatacctcgtacaaccaaaagtttaagggtaaggcaactcttaccgctgacaagtcatcaagcactgcttatatgcagttgtctagtcttacttccgaggattcggccgtgtattactgtgcacgctccacctactacggcggagattggtacttcaatgtgtggggagctggtaccaccgtcaccgtctccgcagcgtcgactaagggcccaagcgtgtttccactcgccccaagctcgaaatccacctccggcggaaccgccgcacttggctgtctggtcaaggactacttccctgagcctgttactgtgtcgtggaactcgggagcccttacgtccggtgtgcatacctttccggctgtcctccaatcgtccggactttacagcctctcgtcggtcgtgactgtgccatcgtcctcgctgggtactcaaacctacatttgcaatgtgaatcataagccatccaatactaaggtggacaagaaggtggaacccaaatcctgtgataagactcacacttgccctccgtgccctgcgcccgagctcttgggaggcccttcagtgtttctgttccctccaaagccgaaagacactctgatgattagcagaactcctgaagttacttgtgtggtcgttgatgtgagccacgaagatcctgaagtcaagtttaactggtatgtggatggtgtcgaagtgcataacgcaaaaactaagccccgcgaggaacagtacaattcgacttaccgagtcgtgtccgtcctcaccgtcctgcatcaggactggctgaacggaaaggaatacaagtgtaaggtcagcaacaaggctctgccggctcccattgagaaaaccatctcgaaggcgaagggccagcctagggagccacaggtgtacactctgccgccatcccgcgatgaacttaccaagaaccaagtctccctgacctgcctcgtgaagggattttacccatccgatattgcagtggaatgggagagcaacggtcaacctgaaaacaactacaagactactcctcctgttctggattctgatggttcgtttttcctgtactccaagctgactgtggataagtcccggtggcagcaaggcaatgtgttctcctgcagtgtgatgcatgaagcacttcacaatcactacacccaaaagtccctctctctgtcccctggaaag

SEQ ID NO: 16041 - DNA, 1425 bp, synthetic construct
  misc_feature 1..1425: note = source = /note="Description of Artificial Sequence: Synthetic coding sequence"
  source 1..1425: mol_type = other DNA
atggccgtgatggcaccgcgtaccctggtgctgctcctgtccggagcgctggctctgactcagacatgggcacaggtccagctacagcagccaggggcggaactggtgaagcccggagcttcggtcaagatgtcatgcaaggccagcgggtatacctttacatcttataacatgcattgggtcaagcagacccccggaagagggctagaatggatcggcgctatttatcccgggaacggggatacaagctacaatcagaagtttaaaggcaaggctaccctaactgctgataaatcctcctctaccgcctatatgcagctgagcagtctgacctcagaagatagtgctgtgtattactgtgcaagaagcacttactatggcggggactggtactttaatgtgtggggagcaggtaccaccgttacggtaagtgccgcctctacaaagggcccatccgtgttccccttggctccttcgtccaaaagtacttcaggaggtaccgccgccttgggctgtttggtgaaagactattttccagagcctgtgaccgtttcatggaactccggcgcccttactagtggggtccacactttcccagcagtcctccaatcttctggcctgtactctctgtctagtgtggtcacagtgcctagctcttcactggggacacagacctacatctgcaacgtcaaccacaaacctagtaacaccaaagtggacaagaaagtcgagccaaaaagttgcgacaaaactcacacctgtcccccttgccccgcgcctgaactcctgggcgggccaagcgtgttcctttttcctcctaaacccaaagatactctgatgatctctcggacacccgaggtgacatgcgtggtcgtcgatgtgtctcacgaagaccccgaagtgaagtttaactggtacgttgacggagtcgaggtccacaatgccaagacgaagcctcgcgaagagcagtacaactccacctacagagtggtgtccgtcctgacggtcctgcatcaagactggttgaacggtaaagaatataagtgcaaagtctctaataaggctttgcccgctcccatcgaaaaaacaatctccaaagccaaagggcagccaagggagccacaggtctataccctgccaccatctagggacgaactgacgaagaatcaggtgtccttgacctgcttggtcaaagggttctacccatcagatattgcagtggagtgggaatccaacggtcagccggaaaacaattacaaaaccaccccccccgtcttggacagcgacggatctttctttctgtactcaaagctgaccgtggataaaagccgatggcagcaagggaacgtgttttcatgttcggtcatgcacgaggctctgcacaaccactacacacaaaaaagcctgtctctgtctcccggaaag

SEQ ID NO: 16042 - DNA, 1425 bp, synthetic construct
  misc_feature 1..1425: note = source = /note="Description of Artificial Sequence: Synthetic coding sequence"
  source 1..1425: mol_type = other DNA
atggcggtaatggcgccgcgaacgctagtactactactatcgggtgcgctagcgttaacgcaaacgtgggcgcaagtacaattacaacaaccgggtgcggaattagtaaaaccgggtgcgtcggttaaaatgtcgtgtaaagcgtcgggttatacgtttacgtcgtataatatgcattgggtaaaacaaacgccgggtcgtggtctagaatggataggtgcgatatatccgggtaatggtgatacgtcgtataatcaaaaatttaaaggtaaagcgacgctaacggcggataaatcgtcgtcgacggcgtatatgcaattatcgtcgttaacgtcggaagattcggcggtttattattgtgcgcgttcgacgtattatggtggtgattggtattttaatgtatggggtgcgggtacgacggtaacggtttcggcggcgtcgacgaaaggtccgtcggtatttccgctagcgccgtcgtcgaaatcgacgtcgggtggtacggcggcgttaggttgtttagtaaaagattattttccggaaccggtaacggtttcgtggaattcgggtgcgctaacgtcgggtgtacatacgtttccggcggtactacaatcgtcgggtttatattcgctatcgtcggtagtaacggtaccgtcgtcgtcgttaggtacgcaaacgtatatatgtaatgtaaatcataaaccgtcgaatacgaaagtagataaaaaagtagaaccgaaatcgtgtgataaaacgcatacgtgtccgccgtgtccggcgccggaactactaggtggtccgtcggtatttctatttccgccgaaaccgaaagatacgttaatgatatcgcgaacgccggaagttacgtgtgtagttgttgatgtttcgcatgaagatccggaagtaaaatttaattggtatgtagatggtgtagaagtacataatgcgaaaacgaaaccgcgtgaagaacaatataattcgacgtatcgtgtagtatcggtactaacggttctacatcaagattggttaaatggtaaagaatataaatgtaaagtttcgaataaagcgttaccggcgccgatagaaaaaacgatatcgaaagcgaaaggtcaaccgcgtgaaccgcaagtttatacgttaccgccgtcgcgtgatgaactaacgaaaaatcaagtatcgttaacgtgtctagtaaaaggtttttatccgtcggatatagcggtagaatgggaatcgaatggtcaaccggaaaataattataaaacgacgccgccggtactagattcggatggttcgttttttttatattcgaaattaacggttgataaatcgcgttggcaacaaggtaatgtattttcgtgttcggtaatgcatgaagcgttacataatcattatacgcaaaaatcgttatcgttatcgccgggtaaa

SEQ ID NO: 16043 - DNA, 1425 bp, synthetic construct
  misc_feature 1..1425: note = source = /note="Description of Artificial Sequence: Synthetic coding sequence"
  source 1..1425: mol_type = other DNA
atggccgtcatggccccaaggacattggtcctcttgcttagcggcgcactggccttgacccagacgtgggcccaagtacagctccagcagcctggtgctgaattggtgaagccgggtgccagcgttaaaatgtcctgcaaagcgtctggctacacctttacctcctacaatatgcactgggttaagcaaacacccggaaggggacttgaatggatcggcgctatttatccgggcaacggagacacctcatacaatcaaaaatttaaaggcaaagctacactcaccgccgacaaatcctcaagcactgcttacatgcagctgagctccctcacctctgaagattccgccgtgtactactgcgctagatccacgtactacggtggagattggtatttcaatgtatggggtgctggcacaactgtgacggtgtcagctgcaagtacaaagggtccttcagtgttcccactcgctccctcaagcaaaagcacgtctggaggcaccgcagccttgggctgcttggtaaaggattactttcccgaacctgtgaccgtgagctggaactctggagccctgacttcaggtgtgcacacttttccagctgtattgcagtccagcggcctctactcactctccagcgtcgtgacagtcccttcttcctccttgggcactcagacctatatttgcaacgtaaatcacaagccatcaaacaccaaggtggataagaaggttgagcccaagtcatgcgataagacccacacctgcccgccttgtccagctcctgagctccttggaggtccatctgtatttctttttccgccgaaacccaaggatactctgatgatctcccgcactcccgaagtcacttgcgttgtagtcgacgttagccacgaggatccagaggtgaaatttaactggtacgtcgacggcgtggaagtgcacaacgccaagaccaaacccagggaggagcagtacaatagcacatacagggttgtgtccgtcctcactgtgctgcaccaagactggctgaacggcaaggaatataagtgcaaggttagcaacaaggccttgccggcgcctatagagaagacaatttctaaggctaagggacaacccagggaaccccaagtctacacccttccaccttcccgcgacgagctgacaaaaaaccaagtgagcctcacatgtctggtgaaaggattttatccctccgacatcgcagttgagtgggaatcaaatggccaaccagagaataactataaaactactcctccagtcctggactctgacggaagcttttttctgtactcaaagctgacggtggataagagtaggtggcagcagggtaacgtcttcagttgctctgtgatgcatgaggccttgcacaatcattacactcaaaagtccctgtccctgtcacctggcaaa

SEQ ID NO: 16044 - DNA, 1425 bp, synthetic construct
  misc_feature 1..1425: note = source = /note="Description of Artificial Sequence: Synthetic coding sequence"
  source 1..1425: mol_type = other DNA
atggccgtgatggcgcccagaacgttggtgttactcttgtcaggtgcccttgccttgacacagacttgggcccaggtgcagctgcagcagccaggcgccgaactggtcaaacccggtgcaagcgttaaaatgtcctgtaaagcttcgggttatacgttcacatcctacaacatgcactgggtgaaacagaccccaggccgggggctggaatggattggcgccatctatccaggcaatggtgacacaagctataatcagaagtttaaggggaaggctacactcactgccgacaagagttcttcaacagcctatatgcagctgtctagtctaacctctgaagactccgcagtgtactattgcgcccgatcgacgtactatgggggagattggtacttcaatgtttggggagcagggacgaccgtgaccgtgagtgcagcatctaccaaaggaccatctgtgttcccactggcacctagtagtaaatcaacctccgggggtaccgccgccctggggtgtctcgtcaaggattactttcctgagccggtgactgtctcttggaacagcggagccctcactagcggggtccatacatttcccgccgtcctgcagagcagcggcttgtacagcttgagctccgtggtgacagtcccaagtagttccttgggcacgcagacttacatctgtaatgtcaatcacaagccttccaacaccaaggtggataaaaaagtcgagccaaagtcatgtgacaaaactcatacctgcccaccatgcccggctcccgaactactcggaggaccgagtgtttttttgttccccccaaagcccaaagacacactgatgatcagccggactccagaagtgacgtgtgtggtggtagatgtgtcacatgaggatcctgaggtaaaatttaactggtacgttgatggcgtggaggtgcataatgccaaaactaagccccgagaagagcaatacaattcaacttaccgtgtggtatcagttctgacagtcctacaccaggactggcttaatggaaaggagtataagtgtaaggtatctaacaaggccctgcccgcccctattgagaagactataagcaaagcaaaaggccaacctcgcgaacctcaggtgtacaccctccccccgagcagggatgagcttaccaagaaccaggtgtctctgacatgcctggtgaaaggtttctatccttccgatatcgcagtagaatgggagagcaacggccagcccgagaataattataagactacccccccagtactcgacagtgatgggagtttttttctgtatagtaagctcacggtggacaagagtaggtggcagcagggcaatgtgtttagttgttccgtgatgcatgaagccctgcacaatcattatactcagaaatccttgagcctcagtccaggcaag

SEQ ID NO: 16045 - DNA, 1425 bp, synthetic construct
  misc_feature 1..1425: note = source = /note="Description of Artificial Sequence: Synthetic coding sequence"
  source 1..1425: mol_type = other DNA
atggcagtgatggcccctagaaccctggttctgctgctgtccggcgcactcgcgcttacccaaacctgggcccaagtgcagctgcagcaacctggagccgagcttgtcaaacccggcgcatccgttaagatgtcatgtaaggcatcaggctacacttttacttcctacaatatgcattgggtgaagcagactcctggtcggggacttgaatggatcggcgctatttaccctggtaatggagatacctcgtacaaccagaaattcaaagggaaggctacccttaccgctgataagtcatcgtccacggcatacatgcaattgtcatcactgacctcggaagattcagcggtgtactactgtgcccgatccacctactacggaggtgactggtactttaatgtgtggggggcgggtaccaccgtgactgtctccgcagcatctactaaaggcccgtcggtctttccccttgcgccgtcgtccaagtcgacgagcggaggtactgcagcactcggttgtctcgtcaaggattactttcccgaaccggtgaccgtctcgtggaactcgggcgcccttacctctggtgtgcatacttttcctgcagtcctccaaagctcgggcctttactcgctttcctcggtggtgaccgtgccctcctcttcactgggcacccaaacttacatctgtaacgtgaaccataagccaagcaacaccaaggtggacaagaaggtcgaaccaaaaagctgcgacaagacccacacgtgtcctccctgtccagctcctgagcttctcggaggaccttccgtctttctcttcccaccaaagcctaaagacactctgatgattagccggactcccgaggtcacctgcgtggtcgttgatgtgtcacatgaggacccagaggtcaaattcaattggtatgtggatggtgttgaggtccataacgcaaagaccaagcccagagaggagcaatacaactcgacttatcgcgtggtgtcggtgctgactgttctgcatcaggattggctgaacggaaaggaatacaagtgtaaagtcagcaacaaggccttgccagcaccaattgaaaaaaccatatcgaaggcaaagggccagcctcgtgaaccccaagtgtacacgctgccaccttcgcgcgacgaactgaccaaaaaccaagtgtcattgacctgtctcgtgaaagggttttatccttcggatatcgccgtggaatgggagtcgaatggtcaacccgagaacaattacaaaaccactccgccagtgctggatagcgatggttcctttttcctttactctaagctgaccgttgacaagtcccgatggcagcaaggaaatgttttttcctgctccgtgatgcacgaggcacttcacaatcactacactcagaagtccttgtccttgtcgcccgggaag

SEQ ID NO: 16046 - DNA, 1425 bp, synthetic construct
  misc_feature 1..1425: note = source = /note="Description of Artificial Sequence: Synthetic coding sequence"
  source 1..1425: mol_type = other DNA
atggccgtcatggccccaagaactctggtcttgttgctctccggcgccctcgcactgactcagacgtgggcgcaggtgcaactgcagcagccgggagcagaactcgtcaaaccgggggccagcgtgaagatgtcatgcaaggcttccggatacaccttcaccagctacaacatgcactgggtgaagcagaccccagggcggggactcgaatggatcggtgcgatctaccccggcaacggcgatacttcgtacaaccagaagttcaaaggaaaggcaactctgacggctgacaaatcgtcgtcaactgcctacatgcagctctcatcccttactagcgaggattcggcggtttactactgcgcacgcagtacctactacggaggcgattggtactttaatgtctggggcgcaggcaccaccgtgacggtgtccgccgcttcgacgaaggggccgtccgtgttcccgctggcaccgtcaagcaagagcacctcgggagggactgccgcgctggggtgcctggtgaaggactactttccggaacctgtaaccgtctcgtggaactctggagcattgacctcgggagtccatacctttccggctgtgctgcagtccagcggactttactcgctgtcatccgtggtgaccgtgccgagctcgtccctgggaacccagacttacatctgcaacgtcaaccacaagccatcgaacaccaaagtggacaagaaggtggaaccaaagtcatgtgacaagacccatacctgtccaccatgcccggctcctgagctgctgggaggcccatcggtctttctgttcccgccgaaaccgaaggataccttgatgatctccagaacccccgaggtgacttgcgtcgtcgtggacgtcagccacgaggaccctgaggtgaagttcaactggtatgtggatggggtcgaggtgcacaacgcgaaaaccaagccgcgcgaagaacagtacaactccacttacagagtcgtttccgtgctcacggtcctgcatcaagattggctcaacggaaaggagtacaagtgtaaggtttccaacaaggccctgccggccccgatcgaaaagactatctcgaaggcgaagggacaacctcgggaacctcaggtgtacaccctcccgccgtcgagagacgaattgactaagaatcaggtgtcgttgacttgcctggtcaaggggttctacccttcagatatcgccgtcgaatgggaatctaatggacaaccggaaaacaattacaagaccaccccgccggtgctggacagcgacggctcatttttcctttacagcaagctgacggtcgacaagtcacgctggcaacaaggcaatgttttttcatgcagcgtcatgcacgaggcgttgcacaatcactacacccagaagtccctcagtctgtccccaggaaaa

SEQ ID NO: 16047 - DNA, 1425 bp, synthetic construct
  misc_feature 1..1425: note = source = /note="Description of Artificial Sequence: Synthetic coding sequence"
  source 1..1425: mol_type = other DNA
atggcggtgatggcaccccgcaccctggtcctgctgctgtccggtgcccttgccctgactcagacctgggcgcaagtgcaactgcagcagccaggcgccgaactcgtgaaaccaggtgcatctgtgaagatgtcgtgcaaggcttcggggtacaccttcaccagctacaatatgcactgggtgaagcagaccccggggcggggactggagtggatcggggccatctatccgggtaacggcgacacttcctacaaccagaagttcaagggtaaggcaaccctcaccgctgacaaatcatcaagcaccgcatacatgcaactcagctcgcttacttccgaagattctgccgtgtattactgcgcgcgatccacttactacggaggagattggtactttaacgtgtggggagccggcactacggtgactgtgagcgccgcgtcaacgaagggacccagcgtgttcccgttggcgccatcctccaagtctacttcgggaggcaccgcagcactgggctgtttggtcaaggattactttccagagccggtgactgtcagctggaacagcggagccctcacctcgggagtccatactttccctgcggtgctgcagtcgtcaggcctctactccctttcgtcagtggtcaccgtaccatcatcaagcctgggcacccaaacctacatctgtaatgtgaaccacaaaccgtccaatactaaggtggacaagaaagttgaaccaaagtcctgcgataagactcatacgtgcccaccctgccctgccccggaactgttggggggtccgagcgtgttcctgtttccgcctaagccgaaagacaccttgatgatcagcagaacgccggaggttacctgcgtcgtagttgacgtgtcccatgaggaccccgaggtcaagttcaactggtacgtggacggagttgaggtacacaatgccaagactaaacccagagaagaacagtacaactcgacctaccgcgtggtgtccgtcttgactgtcctgcatcaggactggttgaatggcaaagagtataagtgtaaggtgtccaataaagctctgccggcgccgatcgaaaagaccatctcgaaggcgaaaggacaaccgcgcgagccgcaagtctacaccctgccgccgagcagggatgaactgacgaaaaatcaggtgagcctgacgtgcctcgtgaagggattctaccctagtgatattgcggtcgaatgggagtcgaacgggcagccggaaaacaactataagaccactccaccagtgctcgactcggacgggtcatttttcctgtacagtaagctcactgtggataaaagccggtggcagcaaggcaacgtgttctcctgctcggtcatgcacgaagcccttcacaaccactacacccagaagagtttgagcctcagtccaggaaag

SEQ ID NO: 16048 - DNA, 1425 bp, synthetic construct
  misc_feature 1..1425: note = source = /note="Description of Artificial Sequence: Synthetic coding sequence"
  source 1..1425: mol_type = other DNA
atggcagtgatggccccgcgcactctcgtccttctcctgtctggtgccctggcgctgactcagacttgggctcaggtccaattgcagcagcccggagccgagctggtcaaacccggagcctcagtcaagatgtcttgcaaggcgagtggatacacattcacaagttataacatgcactgggtcaagcaaacacccgggcgtggtctcgagtggataggtgctatttatccaggtaatggagataccagctacaatcagaagttcaaaggaaaggctaccctaactgcggataaatcttcctccacggcctacatgcagcttagctcgctgacgtccgaagattcagccgtttactactgcgctcgttccacatattacgggggtgattggtacttcaacgtgtggggcgcaggcaccaccgtgaccgtgagcgctgcctccactaaaggtccttccgtctttcccttggccccatccagcaagagcacctctggtggcaccgccgctttaggctgtctggtgaaagactacttccccgagcccgtaaccgttagctggaactccggagcgctaacatctggtgtccatactttcccggctgttctccaaagctccgggctgtattctttgagctctgtcgtcactgtaccatcctcaagccttggcactcaaacgtatatctgtaatgtcaaccacaagccatctaacacaaaagtagataaaaaagtggagcccaagtcttgtgataagacacacacttgtcctccctgccccgcacccgagttgctggggggacccagtgtatttttgttccctcccaaacctaaggatacattgatgatctcccgaactcccgaggtcacctgcgtcgtcgtcgacgtgtcacacgaagaccccgaggtgaaatttaactggtatgtggatggagttgaggtgcataatgcgaagacaaaacccagagaagaacagtataattctacatacagagtggtcagcgtcttgaccgtcctgcaccaggattggcttaacggaaaagaatacaagtgtaaggtatcaaacaaagcccttcccgctcctattgaaaagacaataagtaaagcgaagggacaacccagggagccccaagtctacacactacctcctagccgggatgagctgaccaagaatcaggtctccctcacttgtctcgttaaaggattctatccgtcagacattgcggtggagtgggagtcaaatggtcaacccgaaaacaactataagaccacgcccccagtgctcgattctgatggaagcttcttcctttactcgaagctgaccgttgataagtcccggtggcagcagggcaacgtgttctcctgctctgtaatgcacgaggctctccacaatcactatacgcagaagtcactgtctctgtctccaggaaag

SEQ ID NO: 16049 - DNA, 1425 bp, synthetic construct
  misc_feature 1..1425: note = source = /note="Description of Artificial Sequence: Synthetic coding sequence"
  source 1..1425: mol_type = other DNA
atggccgttatggcgcccaggacactggtgctgttactgagcggggcactggccttgactcaaacatgggcacaggtgcagcttcaacagccgggcgcagaactggtcaagccaggagcatcagtgaagatgtcttgcaaggcctcgggatataccttcaccagctataatatgcactgggtgaaacagactccgggcagaggcttggagtggatcggagcgatttatcccggcaacggagacacaagttacaaccagaaatttaaaggaaaggctaccctgacagcagacaaaagttcgagtacggcttacatgcagttgagcagtcttaccagcgaggattcagctgtgtattactgcgctagatctacatattacgggggcgattggtattttaacgtgtggggcgcagggaccaccgtgaccgtgagcgcagcatcaacaaaaggaccaagcgtgtttcctctggctcccagtagcaaaagcacgagcggcggtaccgctgccctggggtgtcttgtgaaggactattttccagagcctgtgaccgtgtcctggaatagcggcgcgctgacttctggagtgcatactttcccagctgtcctgcaaagctctggactgtacagcctgtcttctgtcgtcaccgtgcctagttcctccttgggaacacaaacctatatctgtaatgtgaaccataaacctagtaacaccaaggtcgacaaaaaggtcgaacctaaaagctgcgataaaacacatacctgtcccccctgtcccgctcccgaacttctgggcggccccagtgtgtttctgtttccacccaagcctaaggatacactcatgatctcaagaactccggaagtaacatgcgttgtcgtcgacgtctcacatgaggatccagaggtcaagttcaattggtatgtggacggtgttgaagtgcacaatgccaagaccaaaccgagagaagagcagtacaactcaacgtatcgcgtggtgtctgtactgaccgtgcttcaccaggactggctgaacggaaaggagtacaaatgcaaggtgtcaaacaaggctctgcctgctccaatcgagaaaacaattagtaaagctaaaggacaaccccgggagccccaggtctacaccctgcctccctcccgcgatgaattaactaagaatcaagtgagcctgacctgtcttgttaaaggtttctaccccagcgacatagctgtggagtgggaaagcaacgggcagcccgagaacaattacaagaccacacccccagtcttggatagtgatggctctttctttctgtacagcaagctcacagtggataaatcgagatggcagcaaggaaacgtgttttcatgctccgtgatgcacgaagccctacacaaccactacacacagaaatccctttctctgtctccaggtaaa

SEQ ID NO: 16050 - DNA, 1425 bp, synthetic construct
  misc_feature 1..1425: note = source = /note="Description of Artificial Sequence: Synthetic coding sequence"
  source 1..1425: mol_type = other DNA
atggcagttatggcacctaggacattggtcctgctgcttagcggagctctcgcactgactcagacctgggcgcaggtccagctgcagcagcccggcgcggagctggttaaacctggggcatctgtgaagatgagctgcaaggcgagtgggtacaccttcacaagttataacatgcattgggtcaaacagacacctggccgggggctggagtggattggtgctatttacccaggtaacggggatacatcatacaaccagaagttcaagggaaaggccaccctcaccgccgataaatcttcctctacggcttatatgcagctttctagcttgacctcggaggactctgcggtctactactgtgccaggtccacctattacgggggcgactggtactttaatgtgtggggtgccgggactacggtcacagttagcgccgcttcaactaaaggacccagcgtctttccactggcgccctcctccaaatcgacctcaggaggcaccgcggccctgggttgcctggtcaaagactactttcctgagcccgtaactgtgtcttggaacagcggggcgttgacaagtggcgttcacacgtttcctgccgtcctccagagttctggtttgtacagcctgtcgtctgtcgtgaccgtgccctcctcgtcgcttggcacgcagacgtacatatgcaatgtgaatcacaagccatctaacactaaggtcgacaagaaggtcgaacccaaaagctgtgacaagacgcacacatgtccgccctgtccagctccagaactcctaggagggccctctgtgttcctgttcccgcctaaaccaaaagataccttaatgatttcacgtactccagaggtcacgtgtgtcgttgtcgacgtgtctcatgaagatccggaggtcaagtttaactggtacgtggatggagtcgaggtgcacaatgccaaaaccaagcccagggaagagcagtacaactccacgtaccgcgtcgtgagcgtcctgactgttctgcatcaggactggttgaacggtaaggaatacaagtgcaaggttagtaataaagctctacccgctcctatcgaaaagaccatcagcaaagccaaaggacagccgagggagcctcaagtatacacattacccccaagcagggacgagctgaccaagaaccaggtctcattaacatgtttagtcaaaggattttacccgagcgatatcgcggtggagtgggagtccaacggccaacccgaaaacaactataaaaccacaccaccagtgctagactccgacggctccttttttctatacagcaagctaactgtggataagagccggtggcaacaggggaatgtgttcagctgcagtgtcatgcacgaagcactccacaaccactacactcagaagtcactcagcctgtcaccggggaaa

SEQ ID NO: 16051 - DNA, 1425 bp, synthetic construct
  misc_feature 1..1425: note = source = /note="Description of Artificial Sequence: Synthetic coding sequence"
  source 1..1425: mol_type = other DNA
atggcagtgatggcccctagaactcttgtccttcttttaagcggtgcgttggcactcacacaaacatgggcgcaggttcaactgcaacaaccgggggctgaattagttaagccaggcgcctcagttaaaatgagttgtaaagcttcgggctatacgttcacaagttataacatgcattgggtcaaacaaacaccgggccgtggattggagtggatcggagcaatctatccggggaatggagatacaagttataaccaaaaatttaagggtaaggcaacgttgactgcggataaatcttcatcaaccgcttatatgcaactgagtagccttacatcagaagattctgctgtttattactgtgcccgttcaacctactacgggggagactggtattttaatgtatggggtgctggcaccacagtaacagtatccgcggcttctaccaaaggcccctcggtatttccgcttgcgccgagttcgaagtcgacaagtggcgggacagccgcactcggatgcctcgtgaaagactactttccggaaccagtgacagtatcgtggaattcaggtgccttgacgtctggagtgcatacgtttcctgctgtgctgcaaagctcgggcttgtatagcttaagtagcgtggttacagtaccatcttcatctttgggtactcaaacctacatctgtaacgtgaatcataagccctccaatacaaaagttgataaaaaagtggaaccaaaatcatgcgataagacacatacatgtcctccgtgccctgcgccggaacttcttggcgggccgagcgtgtttttattcccacctaagccgaaagatacactcatgatttcacgaacaccggaagtcacatgcgttgtcgttgatgtaagccatgaggacccggaagtgaaatttaactggtatgtggacggcgtcgaagtccacaacgccaaaaccaaaccgcgtgaggagcaatacaattcaacttacagagttgtgagcgtcctaacggtgttgcatcaggattggcttaatgggaaggaatataaatgcaaagtcagcaacaaagccctgcctgctccaatagaaaagacgatttctaaagcaaaagggcaaccgcgagagccgcaggtttatacactgccgccctcacgggacgaactgacaaaaaatcaggttagcctgacatgcttggtgaaaggattttatcctagcgacatcgcagttgaatgggaatccaatggacaaccggagaacaattacaagacaacgcctccggttctcgattctgacggctcattttttttgtattccaagctaactgtggataagagccgctggcagcaaggaaacgttttttcatgtagtgttatgcacgaagcattgcacaatcactatacacagaaatccttgtcattgtctccgggtaaa

SEQ ID NO: 16052 - DNA, 1425 bp, synthetic construct
  misc_feature 1..1425: note = source = /note="Description of Artificial Sequence: Synthetic coding sequence"
  source 1..1425: mol_type = other DNA
atggcagtcatggctcctcgtacattggtgctattgcttagtggagcgttggctctgacccagacctgggcacaagtgcaactccagcagcccggcgcggagttagtgaagcccggggcatctgttaaaatgagctgcaaagcatctggctacacattcacctcatacaatatgcactgggtgaaacagacaccaggacgcgggctagagtggattggcgccatctaccccggtaatggagatacttcttacaatcaaaagttcaagggcaaggcaaccctgacagccgataaaagcagctcaaccgcctacatgcagttgtcctctctgacaagcgaagactccgcagtctactactgtgcaaggtccacctattacgggggtgactggtacttcaatgtgtggggcgcgggaaccacagtgacagtgtctgctgctagtacaaaagggccctcagtgttccccttagctcctagttcaaagtctacttccggcgggactgcggctctggggtgtttggtcaaagactattttcccgaaccagtgactgtctcctggaacagcggagccttgaccagcggagttcatacatttcctgccgtattacagagttcaggactctacagcctgtcaagcgtggtcacagtcccaagctccagcctgggaacgcagacttacatttgtaacgtgaatcataaacctagtaacacaaaagtggataaaaaggtcgaaccaaagtcatgcgacaagactcatacctgccctccgtgccccgcgccggagcttttgggaggaccctccgtctttctgttcccaccgaagcccaaagacactctgatgattagcaggacccccgaagtgacttgtgtggttgttgatgtctcccatgaagatcctgaagtgaagtttaattggtacgtggatggagtggaggtacacaacgccaagactaaaccgagggaagagcaatacaacagtacgtacagagtcgtgagtgttcttaccgtgcttcatcaggattggttgaacggaaaagagtacaagtgcaaagtgtccaataaagctttgcccgcacctatagaaaaaaccataagcaaggctaagggccagcctcgggagccgcaggtgtacacgctgcccccctcaagagatgaactcaccaaaaatcaagtatctctcacttgtctggttaagggtttctatccatcggatatcgccgtcgagtgggaatccaatggccagcccgagaataactacaaaactactccgcccgtgttggattctgatggctccttctttctctattccaagctgacagtagataagagtcgatggcagcagggaaacgtattcagctgcagtgtcatgcacgaagcgttacacaaccactatactcagaagtcacttagtctctccccggggaaa

SEQ ID NO: 16053 - DNA, 1425 bp, synthetic construct
  misc_feature 1..1425: note = source = /note="Description of Artificial Sequence: Synthetic coding sequence"
  source 1..1425: mol_type = other DNA
atggcagttatggctccgcgcaccctcgttttgctgctgtcgggagcgctcgcacttacccaaacctgggcgcaggtgcaactgcagcagcctggggctgaactggtgaaaccaggtgcttccgtgaagatgagctgcaaggcgagcggatataccttcacctcctacaatatgcactgggtgaagcagacgcccggccgcggcctcgagtggattggggctatctacccgggtaacggagacacgtcatacaaccagaaattcaagggtaaagcgactctgaccgccgataaatcatcctcaactgcgtacatgcaactttcctcgctgacctcggaggattcggccgtgtactactgtgcgcgctcgacctactacggaggggattggtatttcaacgtctggggggccggaaccaccgtcactgtgagtgccgcctcaaccaagggacccagcgtgtttccacttgccccctcatccaagtcgacgtcgggcggcactgcagcgttggggtgccttgtgaaggactacttccccgagcctgtgactgtctcatggaattcgggagccttgacctccggggtgcacacttttcctgcggtcctccagagctcaggactgtattctctgtcgtcggtcgtgactgtgccaagctccagcctcgggacccagacttacatctgcaatgtcaaccacaagccaagtaatacgaaggtggacaagaaggtcgaaccaaaaagttgcgataagacccacacttgcccaccgtgccctgccccggagctgctgggaggaccgtctgtgtttttgttcccgccgaaaccgaaagacactctgatgatcagccgcaccccagaggtcacctgtgttgtcgtggacgtgtcccatgaagatcctgaagtgaagtttaactggtatgtggatggtgtggaagtgcataacgccaaaacgaagccaagagaggaacagtacaacagtacgtacagggtagtgagcgtgcttactgtgctgcaccaggactggcttaacggaaaagagtacaagtgtaaagtgtccaacaaggcactccccgcgcccatcgaaaagactatctcgaaggctaagggacaaccccgggagccccaagtttacaccctgccgccgagccgagatgaactcactaagaatcaggtgtcgctcacttgcttggtgaaaggcttctacccgagcgacattgcagtggagtgggaaagcaatgggcaaccggaaaacaattacaagacgacccctcctgtcctggattccgacgggtccttcttcttgtattccaaactgaccgtggacaagtcccggtggcaacagggaaacgtgttttcatgcagcgtgatgcacgaagcactgcataaccattacactcagaagtccctgtcgctgtcgccgggaaaa

SEQ ID NO: 16054 - DNA, 1425 bp, synthetic construct
  misc_feature 1..1425: note = source = /note="Description of Artificial Sequence: Synthetic coding sequence"
  source 1..1425: mol_type = other DNA
atggcagtgatggccccaagaaccctcgtcctcctcctcagcggggcacttgcgctgacccaaacctgggcccaagtgcaactgcagcagcccggcgccgaactggtgaagccaggcgcaagcgtgaaaatgtcttgcaaggcctcaggatacacctttacctcatacaacatgcattgggtgaagcagaccccgggaagagggctggagtggatcggtgcgatctaccctggaaacggggatacctcgtacaatcaaaagttcaaaggaaaggccaccctgacggctgacaagtcctcctcgactgcatacatgcagctcagctcgctgacgtcggaggactctgccgtgtactactgtgcgcggtccacctattacggaggagactggtacttcaacgtgtggggcgcaggaactaccgtcactgtgagcgcggcttccacgaaagggccctcggtgttcccgctggccccgtcgtcaaagtcgacctctggcggcaccgcggcgctcggctgcctggtgaaggattacttccctgagccggtgacggtgagctggaactctggagcactgacctccggcgtccacacctttccggccgtgctccaatccagcggcctgtattcactttcatctgttgtgactgtgccgagctcgagcctgggaacccagacctacatttgcaacgtgaaccacaagccatcgaacaccaaggtcgacaagaaggtggaacctaagtcgtgcgacaagactcatacgtgtcctccttgcccggcaccggaactcctgggaggtccgagcgtttttctgtttcctcctaagccaaaggatacgctgatgatctcgcggactccggaagtgacttgcgtggttgtggacgtctcccatgaggatccggaagtcaaattcaattggtacgtggatggggtggaagtccataacgccaagaccaaacctcgcgaagagcagtacaactccacctaccgggtcgtgtccgtgctgactgtgctgcatcaggattggctgaacgggaaagaatacaaatgcaaagtatcgaataaggccctcccagctcctatcgaaaagactatctccaaggcgaaaggacaaccccgcgaaccgcaagtgtataccttgcctccgtcgagagacgaacttactaagaaccaagtttcgctgacgtgtctggtgaagggattttacccatctgatatcgccgtcgagtgggaatccaatggccagccagaaaacaactacaagaccactccgccggtgttggattccgacggaagttttttcctgtactccaagctgactgttgacaaaagccgatggcagcagggcaacgttttctcctgctcggtgatgcacgaagccctgcacaaccactacactcaaaaaagcctgagcctcagcccgggaaaa

SEQ ID NO: 16055 - DNA, 1425 bp, synthetic construct
  misc_feature 1..1425: note = source = /note="Description of Artificial Sequence: Synthetic coding sequence"
  source 1..1425: mol_type = other DNA
atggcagtgatggcccctagaaccctggtgctcctgttgtcgggtgccctggctcttacccagacttgggcacaggtgcagctgcaacagccaggagccgaacttgtgaagccgggagccagtgtgaagatgtcctgcaaggcctcggggtacacgttcacttcgtacaacatgcactgggttaagcaaactccgggacgcggcctcgaatggatcggcgcaatataccctgggaatggggataccagttacaatcaaaagtttaaaggtaaggctacccttaccgcagacaagtcgtcctcaactgcgtacatgcaactgtcgtcgctgacctcggaggactcggcagtgtattactgtgcaagatctacgtactacggtggagactggtactttaatgtgtggggtgcgggcaccacggtaactgtcagcgctgcctcaactaagggaccaagcgtctttcccctggcaccgtcatcgaaaagcaccagcggaggtaccgcagcgctcggctgtctggttaaagattactttccagagcctgtcactgtgtcatggaactctggggcactcactagcggggtccataccttccctgccgtgctgcaatccagcggtttgtactcattgtcatcagtcgtcactgtgccttcgagctccctcggaacccaaacctacatttgtaacgtgaaccacaagcccagcaacactaaggtagataagaaggtggaacctaagtcgtgcgataaaactcacacgtgtcctccctgtcccgcacccgagcttcttggaggcccttcagtgtttctcttccccccaaagcctaaagatacgcttatgatttcccgtacccccgaagtgacctgtgtcgtggtagatgtgtctcatgaagatccagaagtcaaattcaattggtatgtggatggagtggaggtgcataacgcaaaaaccaaacctcgagaagaacaatacaattccacctaccgcgtggtgtcagtcctgactgttcttcaccaggactggctcaacggcaaggagtataagtgcaaagtcagtaataaggcccttccggcacctatcgaaaagactatttctaaggcaaaggggcaaccccgggaacctcaagtgtacaccctgccaccatcgagggatgagcttactaagaaccaggtgagccttacgtgtctcgtcaaaggattttacccatcggacatcgcggtggagtgggagtccaatggtcagccagaaaacaactacaagactactcccccagtgttggactctgacggatccttcttcctgtactccaagctgaccgtcgataaatcccgctggcagcaaggtaacgtgttttcctgcagtgtgatgcatgaagcgctccataaccattacactcagaagtcgcttagcctttcgccaggaaag

SEQ ID NO: 16056 - DNA, 1425 bp, synthetic construct
  misc_feature 1..1425: note = source = /note="Description of Artificial Sequence: Synthetic coding sequence"
  source 1..1425: mol_type = other DNA
atggccgttatggccccccgtactcttgtgctcctcctgtccggcgccctggccctgacgcagacctgggcccaggtgcaattacaacagccgggtgcggagctggtcaaacccggagccagcgttaagatgtcgtgcaaagcttccggctatacatttacatcatacaacatgcattgggtgaagcaaactccagggcgggggctagaatggattggcgccatttatcctggaaacggggacacgtcctacaaccaaaaatttaagggtaaagccaccctgaccgccgacaagtcatcctccactgcttacatgcagttgagttctctgacaagtgaggactctgcagtctattactgtgccaggagcacatattacggaggcgattggtatttcaacgtgtggggagcggggaccacagtgactgtgagtgcagcgtctaccaagggccccagtgtgtttcctctagcccccagctcaaaaagcaccagtggcggaacagccgcgctggggtgcctcgttaaggattactttccagagcccgtgaccgtcagttggaactccggcgctctgacctccggtgttcacacttttcctgccgtgctgcaaagctccggactctacagtctatcatctgttgttacagtgccctccagttccctgggcacccaaacctatatttgtaatgttaaccacaaacctagcaacaccaaagtagataaaaaagtggagccaaaatcctgtgacaagacacatacgtgtcccccttgcccagctcccgagttactcggtggtccgagcgtctttctgttcccaccaaagcccaaggatactttaatgatctcacgtacacctgaagtgacttgcgtagttgtagacgtgagccacgaggatcctgaggtgaaattcaactggtatgtggacggggtggaagttcacaacgccaagactaagcctcgggaagaacaatacaactctacctaccgcgtggtatctgtgctgacagtgttgcaccaagattggttgaacggcaaagagtacaagtgcaaagttagcaacaaagcattacctgcccctatcgagaaaaccatttccaaagcaaaaggacagcctcgcgaacctcaggtttacaccctccctcccagcagagatgagttaacaaaaaatcaagttagcttgacctgtcttgtgaagggattttatccctccgacattgcagtagaatgggaatcaaacggccaaccagaaaacaattacaagactacaccaccagtgttagacagtgacggctctttctttctctactctaaactgacggtggataaatcccgttggcagcagggtaatgtgtttagctgctccgtgatgcacgaagccttgcacaatcactacacccagaagtccctcagcctctccccagggaaa

SEQ ID NO: 16057 - DNA, 1425 bp, synthetic construct
  misc_feature 1..1425: note = source = /note="Description of Artificial Sequence: Synthetic coding sequence"
  source 1..1425: mol_type = other DNA
atggctgtgatggccccgcgcactctggtcctgctcctgtcgggagccctcgccctcactcagacctgggcgcaggtgcagctgcagcaaccaggagcggagctggtgaaaccgggtgcgtccgtgaagatgtcctgtaaagcctcaggctataccttcacttcgtacaacatgcactgggttaagcagaccccagggaggggattggagtggattggagctatctaccctgggaatggggatacctcatacaaccaaaagttcaagggaaaggcgactctgacggccgataagagctcgtcgaccgcatacatgcaactgtcctccctgacttcggaggactcagctgtgtactactgcgcccgttcgacttactatggcggtgattggtactttaatgtgtggggagcgggaactactgtcaccgtgtcggctgcgtccaccaagggaccatcggtctttccgctcgccccaagctcaaagagcacttcgggcggaactgccgccctcggatgtctcgtgaaggactactttccggaacctgtcactgtgtcctggaactcgggagcactcacctcgggggtgcacacctttccggcagttctccaatcctcaggcctgtactcgctgtcgtcagtggttacggtcccctcatcctccctggggactcagacttacatctgtaatgtaaatcataagcctagcaacactaaggtggataagaaggtggagcccaagagctgcgataaaacccatacgtgccctccgtgtccagcgccggagctgctggggggtccatctgtgttcctgtttccgccaaagcctaaggatactctgatgatctcaagaaccccagaggtcacctgcgtcgtggtcgacgtttcccatgaggaccccgaagtgaaattcaactggtacgtcgatggcgtggaagtgcacaatgcaaaaaccaagccacgcgaggagcagtacaactcgacctaccgcgttgtctcggtcctgactgtcctgcaccaggactggctgaacggaaaggaatacaagtgcaaagtctcgaacaaagcactgccggccccgatcgaaaagacgatcagcaaggccaaaggccaaccgcgcgagcctcaggtgtataccctgccgccgtctcgggacgaactgactaagaaccaggtgtcactgacctgtttggtcaaaggcttttacccttccgacattgccgtcgagtgggaatcaaatggccagcctgagaataactacaagacgacgccaccagtgctggactcagacggttcgttctttctgtactcgaagctgactgtcgacaagtcgcggtggcaacaaggaaatgtgtttagctgctcagtgatgcacgaagccctgcacaatcactacacccagaagtccctctcacttagtccgggaaag

SEQ ID NO: 16058 - DNA, 1425 bp, synthetic construct
  misc_feature 1..1425: note = source = /note="Description of Artificial Sequence: Synthetic coding sequence"
  source 1..1425: mol_type = other DNA
atggctgtgatggcgcctcgcacactcgtactcctcctgtccggtgctttggccctaactcagacctgggcacaggttcagctccagcagccaggtgccgagctcgtgaagcccggcgctagtgtcaagatgtcatgtaaggccagtggatataccttcacgagttataatatgcactgggtgaagcagacccccggaagggggctggagtggatcggcgcgatctacccaggaaacggagatacctcatacaatcaaaagttcaagggaaaagcaacgctgacggccgataaatcgtccagcaccgcttatatgcagctgagctcactcacctcagaagacagtgctgtgtattattgcgcccgctctacatactacggaggagattggtatttcaatgtgtggggggctggcaccacagtcaccgtgagcgcagcatccacaaagggcccatccgtcttccccctggcccccagctctaagtctacctctggcggaacagcggccctgggctgcctagtcaaggattattttcctgagcccgtcaccgtgagctggaatagcggtgctctaacgtctggtgtacacacattccccgccgttcttcagtccagcgggctttactctttgtcctctgtggtcactgtgccctcgtcgtctctgggtactcaaacttatatctgcaacgtgaaccacaagccaagtaacaccaaagtcgataaaaaagttgaacccaagtcttgcgacaaaacacacacctgcccaccatgccctgcgccagaactactcggtggtccctcagtattcctattccctcccaagccgaaggacactctgatgatttcccggactccggaggtcacctgcgtggtagtggacgtgagccacgaggaccccgaagtcaagttcaattggtatgttgacggcgtcgaggtacataatgcaaagaccaaaccccgggaagagcagtacaattctacctaccgcgtcgtgtcagtactgactgtgctgcaccaggattggttaaacggaaaggagtataaatgcaaggtctcgaacaaagccctgccagcacccatcgagaaaaccatctctaaagctaagggacaaccacgggagccccaggtgtacactctgccgccttccagggatgagctgacaaaaaatcaggtgtccctgacctgccttgtgaagggcttctaccctagcgacattgctgtggaatgggagtccaacggtcaacctgagaataactataaaacaactccgcccgttttggatagcgacggttcttttttcctctacagcaaactcaccgtggataagtcacgctggcagcagggtaacgtattctcttgctccgtgatgcacgaggctcttcataaccattacacgcaaaaaagcctaagtctgtccccagggaag

SEQ ID NO: 16059 - DNA, 1425 bp, synthetic construct
  misc_feature 1..1425: note = source = /note="Description of Artificial Sequence: Synthetic coding sequence"
  source 1..1425: mol_type = other DNA
atggcagtgatggcgccacggactctcgtgctgctgctttcgggtgcactcgcactcacccagacgtgggcccaagtgcagctccaacaaccaggggcagaactcgtgaagccgggagcatccgtgaagatgtcctgtaaggcctcgggttatacgttcaccagctacaatatgcactgggtcaaacaaacccccggacggggactcgaatggataggcgcaatataccctggaaatggcgacaccagttacaaccagaagttcaagggaaaggcaactcttaccgctgataaatcgagctctacggcgtacatgcagttgtccagcctgacctcggaggattccgccgtgtactactgtgccagatcaacgtactacggaggagactggtactttaacgtctggggggccggtactaccgttactgtctcggccgcatcaaccaagggtccttccgtgtttcctcttgctccttcgtcgaagagcacctccggaggcaccgccgcgcttgggtgtcttgtgaaagattactttcccgaacccgtgaccgtctcctggaatagcggcgccttgacctcgggagtccacactttcccggcagtgctgcagtctagcggactgtattctctcagtagcgtggtgactgtgccttcgtcctcgctcggtactcaaacttatatctgtaatgtgaatcacaagcctagcaataccaaggtggataagaaggtggagcccaagtcatgcgataagacccatacgtgtccaccttgtccggccccagagcttctggggggtccttcggtctttctctttcccccaaagccaaaagacaccctcatgatttcaagaacccctgaagtcacttgcgtggtggtggatgtgagccacgaagatcccgaagtgaaattcaactggtacgtggacggggttgaggtgcataacgctaagaccaaacctcgagaggaacaatacaacagcacctacagggtggtgtcggtgctcaccgtgctccatcaagattggctgaacggtaaggagtacaagtgtaaagtgtcgaacaaggcccttcccgcacctattgaaaagactatcagtaaggcaaagggacagcctagagaaccacaggtctacactcttcctccctcacgagacgaactcaccaaaaaccaagtctccctcacttgtctggtgaaaggattctacccttccgatatcgcagtcgaatgggaatccaatggccagccagagaacaattacaagacgactccgcccgtgctggatagcgatggatccttcttcctgtactcaaaactcaccgtggacaagtccagatggcagcaggggaacgtcttttcctgctcggtgatgcacgaggctctgcacaaccattacacccaaaagtcgttgtcgctgtcgcctggcaaa

SEQ ID NO: 16060 - DNA, 1425 bp, synthetic construct
  misc_feature 1..1425: note = source = /note="Description of Artificial Sequence: Synthetic coding sequence"
  source 1..1425: mol_type = other DNA
atggctgtgatggcacctagaaccctggtgctcttgctctccggtgcgctggcacttacgcagacgtgggcccaggtccaacttcaacagcctggagcagaactggtcaagcctggtgcatccgtcaagatgtcttgcaaggcctcagggtacacgtttactagctataacatgcactgggtgaagcaaactcccgggagaggacttgaatggataggagcaatctacccgggaaacggagacacctcctacaaccaaaagttcaaggggaaagcaaccctgactgcggataagtcctcatccactgcgtatatgcagttgtcgtccctgacctcggaggactcggctgtgtactactgtgccaggtcaacttactacgggggagattggtactttaatgtttggggagcaggtaccacggtgactgtgtccgctgcttcgaccaaaggcccctcggtgttccctcttgccccaagttccaaatcgacgagtggtggaaccgctgctctgggttgtcttgtcaaagactacttccctgaacctgtgactgtctcatggaactcgggagcacttacgtccggggtgcatacgttccctgcggtgcttcagtcgtcgggcctgtattccctctccagcgtggtgaccgtcccatccagctcccttggaactcagacctacatttgtaacgtgaatcacaaaccctcaaacacgaaggtggacaagaaagtggagccaaagtcgtgcgataagactcatacttgcccaccatgtccggcgcctgaacttctcggcggaccaagcgtgtttctctttccgcctaaacctaaggatactctcatgatttcccgcaccccagaagttacctgtgtggtggttgatgtgagccatgaagatcccgaagtcaaattcaactggtacgtggacggcgtggaggtacataacgcaaagaccaagcctagggaagagcaatacaattccacttaccgagtcgtgtcggtgttgactgtgctgcatcaagattggcttaatggaaaggagtacaagtgtaaggtttctaacaaggcacttccagcacctatagaaaagacgatcagtaaggccaaaggtcaaccgcgtgaacctcaagtgtataccctgcctccttcccgggatgaactcacgaaaaatcaagtgtcactgacgtgtttggtcaagggtttttacccatcggatattgcagttgagtgggaatcgaatggacaaccagaaaacaattacaagactacccctcccgtgctggactcggacggatcgttttttctgtactcgaagttgactgtcgataagtcaagatggcagcagggaaacgtcttttcatgctctgtgatgcatgaagcacttcacaaccattacacccagaagtcattgagcctctcccccggaaag

SEQ ID NO: 16061 - DNA, 1425 bp, synthetic construct
  misc_feature 1..1425: note = source = /note="Description of Artificial Sequence: Synthetic coding sequence"
  source 1..1425: mol_type = other DNA
atggccgttatggctccccgaactctcgttctgctactgtctggtgcactggctctaacccagacatgggcacaagtacagctgcaacagcccggggccgaactggttaaacccggcgcctccgtgaagatgtcatgcaaagcctcgggatacacctttacaagttataatatgcactgggttaagcagactccaggtaggggcctcgagtggattggggccatttatcccgggaatggggatacgtcctataatcagaagttcaaagggaaagccaccctgacagctgacaaatccagctccaccgcttatatgcagctttcgagcttaacttctgaggactcagctgtttactactgtgcacggagcacttattacggaggcgactggtacttcaatgtgtggggcgccggaaccaccgtcaccgtgtcggctgcttcaaccaagggaccttcagtatttccgcttgctcccagtagcaaaagcactagcggggggaccgctgccctcggctgccttgtcaaggattactttcccgaacccgtgaccgtgagctggaattcaggtgctctcacttcgggcgtccacacattcccagccgtgctgcaaagctccgggttatatagtctgtcctccgtggtgacggtaccgtctagttcgttagggacgcagacttatatttgcaacgtgaaccacaagccctctaataccaaggtggacaagaaagtggaacccaaatcctgcgataaaacacatacttgcccaccgtgcccagctcccgaattgctgggtggccccagtgtcttcctgttccctcccaagcccaaggatactctcatgataagccggactcccgaagtgacgtgtgtggtagttgacgtgtcccacgaggaccccgaggtgaagttcaattggtacgttgacggggttgaggtgcataacgcaaaaaccaaacctcgggaggaacagtacaattcaacgtatagagtcgtgagtgtgctgactgtgctacaccaggactggctgaacgggaaggagtataagtgcaaagttagtaataaagccctgccggcgccaatcgagaagacaatttcaaaagcaaagggccagccccgagagcctcaggtgtataccctgccgccatctcgagatgaattgacaaaaaatcaagtttcactcacctgcttagtcaagggcttttatccaagtgacatcgcagtggaatgggagagcaatggacagccggaaaacaattataagaccacaccccccgttctggatagcgacggttcatttttcctgtacagcaagctcacggtcgataagtcccgctggcagcaggggaatgtgttctcctgcagtgtgatgcacgaggccttgcacaaccattatacacagaagtcactgtccctctctcctggtaaa

SEQ ID NO: 16062 - DNA, 1425 bp, synthetic construct
  misc_feature 1..1425: note = source = /note="Description of Artificial Sequence: Synthetic coding sequence"
  source 1..1425: mol_type = other DNA
atggctgtgatggccccaagaaccctggtgttgctcctaagcggtgccctggcgctgacccagacctgggcccaggtgcagctgcaacagcctggggctgaactcgtgaagccaggagcgtcagtgaagatgagctgtaaggcaagcggttacaccttcacgtcatacaacatgcactgggtgaagcagacgcccgggcgcgggttagaatggataggagctatctatcccggtaatggggacaccagctacaaccagaagttcaaggggaaggcgacactcaccgccgacaagtctagttccacggcatacatgcagcttagtagtctcacaagcgaagattcagcggtgtattattgcgctaggtccacatactacgggggcgactggtacttcaatgtgtggggcgcaggtactactgttaccgtatctgctgctagcactaaggggccgagtgtttttccacttgccccctcatcaaaatcaactagtggagggacagctgccctcgggtgtctggttaaagattatttcccagagcccgtgacagtcagttggaattccggcgccctgaccagcggcgtgcataccttccctgcggtcctgcagtcctccggactatactcactcagcagcgtcgtgaccgtgccttcgtcatccttgggcacccagacttacatctgcaatgtgaaccataagccttcaaataccaaggttgacaagaaggtcgagcccaagtcctgtgataagactcatacctgcccaccttgcccggcaccggaattgcttgggggcccttccgtgtttctgttccctcccaagcccaaggacacgctaatgatttctcggacacctgaggtgacctgtgtcgtcgtggacgtcagtcatgaggatcccgaagttaaattcaactggtacgttgatggcgttgaagttcataatgccaaaactaagcctcgtgaggagcagtataatagcacatatagagtggtctccgtgctgaccgtcctgcaccaggactggctcaacggcaaggagtataaatgcaaggtcagtaacaaggcactccccgctccaatagagaagactatcagcaaagcaaaaggccagcctcgggagcctcaggtctacacactgcccccctcccgagatgaactcaccaaaaaccaagtctcactaacctgcctggtcaaaggcttctatccatcagacatcgctgtcgagtgggaatccaacggccagcccgaaaataattacaagacaacaccaccagtgctcgatagtgatggaagcttttttctctatagcaagctgactgtggacaagtcccgttggcaacaaggaaatgtgttctcatgttctgtgatgcatgaagcactgcacaaccattatacccagaaatctctgtcgctctctcccggcaag

SEQ ID NO: 16063 - DNA, 1425 bp, synthetic construct
  misc_feature 1..1425: note = source = /note="Description of Artificial Sequence: Synthetic coding sequence"
  source 1..1425: mol_type = other DNA
atggcagtaatggcacccagaaccctcgtcctgttgctttccggagcgctggcactgactcaaacttgggcacaagtccagctgcagcagccaggcgccgagttggtgaagccaggggcatcagtgaagatgtcgtgtaaagcatcgggttacacctttacgtcgtacaacatgcactgggtcaagcagacccccggacgagggctggaatggatcggagccatatacccagggaacggtgatacctcgtacaatcagaagtttaagggcaaggctaccctgacggctgataagtccagttctaccgcatacatgcagctgtcctcactgacctctgaagatagcgccgtgtactactgcgcgcggtcaacttactatggaggtgactggtacttcaacgtttggggagccgggactactgtcactgtgagcgcagcaagcacgaagggcccatctgtgtttccactggctccaagctcgaaatcgacctctggaggaaccgccgctttgggttgtcttgtcaaggattactttcctgaacctgtcactgtgtcctggaattcgggggcacttacctcaggagtccatacttttcctgcggtgcttcaatcgtccggactttactcactttcctcggtggtcaccgtgccttcctcgtcattgggaacccaaacttacatctgtaatgtgaaccataaaccttcaaacaccaaggtggacaagaaggtcgaacctaaatcgtgcgataagactcatacttgtccaccctgcccggcacccgagttgcttggtgggccgagcgtctttctttttccacctaagccaaaggacaccctgatgatctcccgaacccccgaagttacctgcgtcgtcgtggacgtgagccatgaagatcctgaagttaagttcaactggtacgtggatggcgtcgaggtgcataatgcaaaaactaagcctagagaagagcagtataacagcacgtaccgggtggtgtcagtgcttactgtgcttcatcaagattggctgaacggaaaggaatacaaatgtaaggtcagcaacaaggcgctgccagcaccaatagaaaaaaccatcagcaaagctaaagggcagccacgcgagccacaagtttacactcttccaccatccagagacgaacttactaaaaaccaggtgtccctgacctgtctcgtgaagggattttacccttcggatatagccgtggaatgggagtcaaacggacagcccgagaataactacaagaccactcccccagttctggattccgacggatccttttttctgtactcgaagctcactgtggacaaaagccgttggcagcaaggtaatgttttctcctgtagcgtcatgcatgaagcactccacaatcattacactcaaaagtcgttgtcgctttccccaggcaag

SEQ ID NO: 16064 - DNA, 1425 bp, synthetic construct
  misc_feature 1..1425: note = source = /note="Description of Artificial Sequence: Synthetic coding sequence"
  source 1..1425: mol_type = other DNA
atggccgtgatggcccctcgcactctggtgctcctgctcagcggcgccctggccctgacccagacctgggctcaggtccagttgcagcagccgggagcagaacttgtgaagccaggagcctcagtcaagatgagctgcaaggcatcgggatacactttcacctcatacaatatgcactgggtcaagcagaccccgggcagaggcctggagtggatcggagctatctaccccggaaatggagacactagctacaaccagaagttcaaaggaaaggcgactctcactgcggataagagctcgtcgaccgcctacatgcaactgtcgtcccttacctccgaagattccgcggtctactactgcgcccggtccacctactacggtggagattggtatttcaacgtctggggtgccggaactaccgtgactgtgagcgctgccagcactaaaggaccatctgtgtttccgttggcaccatcatcgaagtccacttcgggaggcaccgctgctctgggatgccttgtgaaagactactttcctgagcctgtaactgtgagctggaattcaggagcgctgacttcaggagtgcacaccttcccggccgtgctgcagtcgtcaggtctgtactcattgtcctccgtcgtaaccgttccctccagctcgctgggtacgcaaacttatatctgcaacgtcaatcacaagccatcaaataccaaggtggacaagaaggtggagcccaaaagctgcgataagactcacacgtgtccgccatgccctgcccctgaactgctgggagggccgtcagtgttcttgtttcctccgaaaccgaaggacaccttgatgatctcgaggactccagaggtgacgtgcgtcgtggtggacgtttcgcacgaagatccagaggtcaagttcaactggtacgtggatggggtcgaggtgcataacgcaaagaccaagccacgggaggaacaatacaactcgacttaccgcgtggtgtcagtcctgaccgtgttgcaccaggattggctcaacgggaaggaatacaagtgcaaggtgtctaacaaggccctgccagccccgattgaaaaaactatcagtaaggccaagggacaaccgcgcgagccccaagtctacaccctgccaccaagcagagacgagcttacgaaaaatcaagtgtccctgacctgcctcgtcaagggattctacccgagcgacatcgctgtggaatgggagagcaatggacaacccgaaaacaactacaagacgacgcccccagtgctcgactcggacggatcttttttcttgtattcgaagttgactgtcgacaagtccagatggcagcaaggaaacgtgttctcctgctcggtaatgcacgaggcccttcataaccattacactcaaaaatcgctgagcctctccccaggcaag

SEQ ID NO: 16065 - DNA, 1425 bp, synthetic construct
  misc_feature 1..1425: note = source = /note="Description of Artificial Sequence: Synthetic coding sequence"
  source 1..1425: mol_type = other DNA
atggccgtgatggcgcctcggacactggtcctgctgctctcgggggcgctggcgctgacccagacttgggctcaggtgcaattgcagcagcccggggctgaactggtgaagccaggtgcatctgtgaagatgtcttgcaaggccagtgggtacacctttacgtcatacaacatgcactgggtgaagcaaacaccggggcggggactggagtggattggcgcaatctacccaggcaacggggacacatcatataatcagaaatttaaaggaaaagccaccctcactgccgacaagtcctcctctacagcgtatatgcagttgtcatcccttacaagtgaggactctgccgtatactactgcgccagaagcacctattacgggggcgactggtatttcaacgtctggggggcaggaactacggtgaccgtatcagccgctagcaccaaagggccctcagtgtttcccttagcccctagttctaagtcaacctccgggggaactgctgctctggggtgtctggtcaaagattacttcccagagcctgtgacagtctcctggaattctggcgcgcttacgtcgggggtccatacctttcccgccgtccttcaatctagtggactttacagtctcagttccgtggtgaccgtcccttctagttccctcggcacacagacatatatttgcaacgtcaatcataaaccatccaacacaaaagttgataaaaaagttgaaccgaagtcctgtgacaaaacacatacgtgtcccccttgcccagctccggaactgctcgggggaccttctgtcttcctattccctccaaaaccaaaagacacactgatgatctcccgcacaccggaggtaacctgtgtggttgtggacgtttctcacgaggatccagaagtcaaatttaattggtatgtggacggcgtagaagtgcataacgcgaagaccaagcccagagaagaacagtataactccacctaccgagtagtcagcgtacttactgtgctacaccaggattggctgaacggaaaggagtataaatgcaaggtttcgaataaagctctcccagctcctattgagaaaacaatttctaaagcaaagggccagcctagggagcctcaggtgtacaccctccccccatcccgggacgagttgacgaagaaccaagtcagcctcacctgtcttgtgaagggcttttacccgagcgatatagccgtcgagtgggaatctaatgggcagcctgaaaacaactacaagacaacccctcctgtcttggacagcgatggcagttttttcctatacagtaaactgactgtggacaagtctcggtggcagcagggcaacgtcttcagctgcagtgtgatgcatgaagcgctgcataatcattatacccagaaatcactgtccctatccccaggtaag

SEQ ID NO: 16066 - DNA, 1425 bp, synthetic construct
  misc_feature 1..1425: note = source = /note="Description of Artificial Sequence: Synthetic coding sequence"
  source 1..1425: mol_type = other DNA
atggcagtcatggctccccgcaccctcgttctgctgttgtcaggtgccttagctcttacgcaaacctgggcccaggtccaattgcagcagccgggcgcggagcttgtgaagcccggtgcttctgttaagatgtcctgcaaagccagcggctatacctttacctcctataacatgcactgggttaagcagacccctgggcgtggcctggaatggattggagcgatctaccctggaaatggtgacacatcctataatcaaaagttcaagggcaaagcgacccttacggcggacaaatcgtcttcaacagcctacatgcagctgtctagcctaacatccgaagacagcgcggtatactattgtgcccggtcgacttactacggtggggactggtatttcaacgtctggggagctggcactaccgttactgtgagtgcggcctcaacaaaggggccttccgtgtttccactggctccctcctctaagagcaccagtggtggcacagcagctctagggtgcctggtgaaggattacttccctgagcctgtgacagtatcatggaactcaggagctttgacctcaggagtccacacctttccagccgtcctacagtcctccggactttacagcctgtcttctgtggtgactgtcccctcctcaagcctggggacccaaacatacatctgcaacgtgaaccacaaacctagcaataccaaggtggacaaaaaggtcgaaccaaagtcatgtgacaaaactcacacctgcccaccgtgccccgccccagaactgctcggaggacccagcgtgttcctgtttccacctaagccgaaagacactcttatgatttcacggacacccgaagtcacctgcgtggtggtggacgtctcacacgaggaccctgaagtgaaattcaattggtacgtcgacggagtggaggttcacaatgctaaaaccaagccgagggaggagcagtacaattccacatatcgcgtagttagcgtcctgacagtgctccatcaagattggttgaatggcaaggagtacaaatgcaaggtgagtaataaagcacttcctgcacccattgaaaaaaccatcagcaaagcaaaagggcagccgagagagccccaggtgtacaccttgccaccgagccgggacgagctgaccaagaatcaagtgagtctgacctgtctggtgaaggggttctacccctcagacattgctgtcgagtgggagtctaatgggcagccagagaataattacaagaccaccccaccagtgctggactcagatggctcgtttttcttgtattctaaactgaccgtggacaaaagtaggtggcagcagggcaacgtgttcagctgcagcgtcatgcatgaagccctacataaccattatacgcagaagtcactgagcctatcacccggcaaa

SEQ ID NO: 16067 - DNA, 1425 bp, synthetic construct
  misc_feature 1..1425: note = source = /note="Description of Artificial Sequence: Synthetic coding sequence"
  source 1..1425: mol_type = other DNA
atggccgttatggcccctcgaactttagtcctgctattgagcggagcactcgcattgacccagacatgggcccaagtccaactccaacagcccggggcagaacttgtcaagcctggcgcatcggttaaaatgagctgtaaggcaagtggctatacatttaccagctacaacatgcactgggtcaagcagacgccaggaagaggcctggaatggattggtgctatttaccctggtaatggtgataccagctacaatcagaagtttaaagggaaggctacgctgaccgcagacaaatcatcatcaacggcttatatgcaacttagcagcttaacatccgaggattctgccgtgtactattgtgcccgatcgacctattacgggggcgactggtatttcaacgtttggggggcagggacgaccgtcacagtgagtgcagctagcacaaaggggccatccgtgttccctttggccccatctagtaaatcaacaagcggaggcactgccgccctgggttgcctggtaaaggactatttccctgaacccgtcactgtctcatggaattcaggggctctgaccagcggcgtgcacacttttcccgctgttttgcagtcttccggcctgtactctttgtctagtgttgtgaccgtgccttcaagctcactggggacgcagacatatatctgcaatgtgaaccacaagccttctaatactaaggtcgacaaaaaagtggagccaaaatcctgtgataaaactcacacgtgtcccccctgcccagcccctgaattgcttgggggacccagcgttttcttgtttcctccgaaaccgaaggatacattgatgataagcaggactccagaagtcacttgtgtggtggtcgacgtcagccacgaagacccagaggtgaagttcaattggtatgtagacggagtcgaggtgcataacgctaagactaaacctagggaagagcagtacaacagtacttaccgagttgttagcgtcctcacggtgctgcatcaggattggttaaacggaaaggagtataagtgtaaggttagtaacaaggccctgcctgcccctattgaaaagactataagtaaagccaaagggcagcccagggagccacaagtgtataccttgcctccatcaagagacgaactgaccaaaaatcaggtaagtctgacttgcctggtgaaaggtttttatcccagtgatatcgcggttgaatgggagagcaacggacagccagaaaataattataaaaccacccccccagtgttggattctgatggatccttttttctctacagcaagttgacggtggataagtcccgctggcagcagggaaatgtgtttagctgtagtgtgatgcatgaggctctgcacaaccactatacccagaagtctcttagccttagccccggcaag

SEQ ID NO: 16068 - DNA, 1425 bp, synthetic construct
  misc_feature 1..1425: note = source = /note="Description of Artificial Sequence: Synthetic coding sequence"
  source 1..1425: mol_type = other DNA
atggcggtgatggccccacggactcttgtgttgctacttagcggcgcgctcgctcttactcaaacctgggcgcaagtgcagctgcagcagcctggagccgagttggtgaagccgggagcgagtgtaaagatgtcatgcaaagcgagcggttatacctttacctcgtataatatgcattgggtgaagcaaacccctggacggggactagagtggattggagccatctatcccggaaacggagatacgtcgtacaatcagaagttcaagggcaaggcaaccctcacggcggacaagagtagttccactgcctacatgcagctgagctcgttaaccagcgaggattcggctgtgtactattgcgcgcgtagtacgtattatggcggcgactggtacttcaacgtgtggggagcaggcactaccgtaacggtgagtgccgcatcgaccaaaggccccagcgtcttcccgctagcgccgtcgagtaagtcgacaagcggtggtaccgccgcccttggctgcctggtaaaagattacttcccggagcccgtgacggtgagctggaactccggtgcgctaacctcaggcgtacacactttccctgcggtcttgcagtcgagcgggttgtattcgctgtcgagcgttgtcactgtaccctcatcgtccctcggcacccagacgtacatttgcaacgtcaaccacaagccgagcaataccaaggtggataaaaaggtagaacctaagagctgtgataagacgcatacctgtcccccgtgccccgcgcccgaactgctggggggtcccagtgtgtttttgtttcccccgaagccgaaggacactctgatgattagccgcacgcccgaggtcacttgcgtcgtggtggacgtgtcgcatgaggatccggaggtgaaattcaactggtacgttgacggcgtcgaagtacacaacgccaagaccaagccgcgcgaagagcaatataacagtacgtatcgagtggtctcagtcctgacggtgctccatcaggattggctgaacgggaaggagtataagtgcaaggtgagcaacaaagccttgccggcgccgatagaaaaaacgatatctaaggcgaagggtcagccacgcgaaccccaggtgtacacgctccccccatcccgagacgagctgacgaagaatcaagtctctttaacgtgcctagtgaagggtttctatccttccgacattgctgtagagtgggagtcgaacggacagccggagaacaactataagaccacgcccccagtactggactctgacggctcgttcttcctgtactcgaagttgaccgtggataagagtcgctggcaacagggcaacgtcttctcatgctcggtcatgcacgaggccttgcataaccattacacgcagaaatccttatcccttagcccaggaaag

SEQ ID NO: 16069 - DNA, 1425 bp, synthetic construct
  misc_feature 1..1425: note = source = /note="Description of Artificial Sequence: Synthetic coding sequence"
  source 1..1425: mol_type = other DNA
atggcagtcatggcgcctcgcacactcgtgctgctcctgtccggggcattggccctgacacagacttgggctcaggttcagttgcagcagcccggagccgagttggttaagccaggagcaagtgtgaagatgagctgtaaggctagtggctacactttcacttcatacaacatgcattgggttaaacaaacacctggcagggggctggagtggattggagccatctatcctggaaacggcgacacttcatacaaccaaaagtttaaaggcaaagctaccctaaccgctgacaaaagttctagcacagcgtacatgcaattgtcaagccttacctctgaagatagcgctgtgtactactgcgcccgctccacatattacggtggggactggtacttcaacgtgtggggcgcagggaccactgtgaccgttagcgctgcaagcacaaaaggcccaagcgtttttccgttagcacccagcagcaaatcaacctccggagggacagctgctctgggatgtctggtcaaggattatttccccgaacctgttacagtgagctggaactccggcgccctgactagcggcgtgcataccttcccagccgtgcttcagagctctggattgtacagcctgagctccgttgtcactgtaccgtcgagcagcctgggtactcagacgtacatatgcaacgtgaatcacaaaccaagcaataccaaggtggacaagaaggtggagccaaaatcctgtgacaaaacccacacttgccccccctgtcccgcaccagaactcctgggaggaccgagcgtgttcctgtttcctccgaaaccaaaggatactttgatgatcagcaggacccccgaagtgacatgcgtcgtagtggatgtgtcacatgaggaccctgaggtgaaatttaactggtacgtagacggagtcgaggttcacaacgccaaaacgaaaccaagggaggaacaatataacagcacataccgcgtggttagtgtcctgaccgttcttcaccaggattggctaaatggaaaagaatacaagtgcaaggtgagcaacaaggcgctacctgcccccatcgaaaagactatttccaaggccaagggccaacctagagaacctcaggtgtacacactacccccaagccgcgatgagcttaccaagaatcaggtgtcactcacctgcctggtgaaaggcttttatcctagcgatatcgcagttgagtgggagtctaacggacagccagaaaataactacaaaaccaccccacctgttctcgacagcgatgggtctttctttctgtactcaaagctaactgtggacaaatctcggtggcagcaagggaacgtcttcagctgcagtgtgatgcacgaggctctccataatcattacacacaaaaatccctgagtctgagccccggcaaa

SEQ ID NO: 16070 - DNA, 1425 bp, synthetic construct
  misc_feature 1..1425: note = source = /note="Description of Artificial Sequence: Synthetic coding sequence"
  source 1..1425: mol_type = other DNA
atggccgtcatggccccgagaacgctggtcctcctgctttcaggggcactggcgctgacccagacttgggcgcaggtgcaactccagcaaccgggagcagaacttgtcaagccgggcgcgtccgtcaagatgagctgcaaggcatcggggtacactttcacgtcctacaacatgcactgggtgaagcagactccaggaagaggcttggaatggatcggagccatatacccaggcaacggagacacgagctacaaccaaaagtttaaaggaaaggccaccctcaccgccgacaaatcgtcgagcacggcttacatgcagctctcatcgttgacctcggaagattccgcagtgtattactgtgccaggtcaacctactatggaggggactggtacttcaacgtctggggagccggtactacggttactgtgtccgcagcttccaccaagggaccgtccgtctttccactcgccccgtcatcgaagtcaacctcgggcggaactgctgccctgggctgtctggtcaaggactacttccctgaacctgtgaccgtgtcctggaacagcggagccctgactagcggcgtgcataccttccctgcggtgctgcagagttccggcctctactctctttcatccgtcgtgactgtgccctcgtcctcactggggacccaaacttacatctgcaacgttaatcacaagcccagcaacaccaaggtagacaagaaggtggagccgaagtcctgcgacaagacccatacctgcccgccatgcccagcgcccgagctcctggggggaccatcggtattcctcttcccgccgaaaccaaaggatacccttatgatctcgcgcactcctgaggtgacttgcgtggtggtggatgtgagtcacgaagatcctgaggtcaagttcaattggtacgtggatggagtcgaagtccacaatgccaagacgaaaccacgcgaggaacagtacaatagcacttaccgcgttgtctccgtcctgaccgttcttcaccaagactggttgaatgggaaagagtataagtgcaaagtgagcaataaggcactgccggcgccgatcgagaaaactattagcaaggctaagggacagccacgagaaccccaggtgtacactctgccgccctcgcgtgatgaactcactaagaaccaggtgtctttgacgtgtctggttaagggattttacccgtccgacatcgccgtggagtgggaaagcaacggacaacctgagaacaattacaagactacccctcccgtgttggactctgatggttcgtttttcctgtacagcaaactgaccgtggacaaatctaggtggcagcaaggaaacgtgttctcttgctctgtgatgcatgaagcactgcacaaccattacacccagaagtcgctgagcctctccccgggtaaa

SEQ ID NO: 16071 - DNA, 1425 bp, synthetic construct; identical to SEQ ID NO: 16009
  misc_feature 1..1425: note = source = /note="Description of Artificial Sequence: Synthetic coding sequence"
  source 1..1425: mol_type = other DNA

SEQ ID NO: 16072 - DNA, 1425 bp, synthetic construct
  misc_feature 1..1425: note = source = /note="Description of Artificial Sequence: Synthetic coding sequence"
  source 1..1425: mol_type = other DNA
atggctgtgatggccccacggactctggtgctcctattgtctggggccttagcgctcacacagacctgggctcaggtgcagctacagcaacctggagccgagctggtgaagccaggggccagcgtgaaaatgtcctgtaaagcctccgggtacacctttactagctataacatgcattgggtgaagcagacccccgggcgaggactggagtggatcggcgcgatctatccgggaaacggggacacatcctacaaccagaagtttaaaggaaaggccaccctgactgctgataaatcaagctcaaccgcttacatgcagctgtcaagcctgacatccgaagattccgccgtgtattattgtgcccgctcaacatactatggaggagattggtactttaatgtgtggggggctggcaccaccgtgaccgtgtccgcagctagtaccaagggcccaagcgtgttcccactcgctcccagctctaaatcaacttctggggggactgctgctcttggatgtcttgtgaaggactattttccagagcccgtaacagtgagctggaacagcggagcactgacttcaggcgtgcacacgtttcccgctgttctgcagagctccggactttattccctaagctccgtcgtcacggtcccctcctcctctctggggacccaaacctatatctgtaacgtgaatcacaaaccaagcaacaccaaagttgataaaaaggtggaacccaaatcttgcgataaaacgcacacctgccccccatgtcctgctccagagctgctcggaggtccaagtgtgttcctctttccacccaagccaaaggacactctcatgattagcagaactccagaggtgacttgtgtagtggttgacgtttcccatgaggaccctgaggtgaagtttaactggtacgtggacggcgttgaggtgcacaatgccaaaaccaaaccacgcgaagaacagtacaattccacttaccgcgtggtctccgttctcacagtacttcaccaggactggctaaatggaaaggagtacaagtgcaaggtctccaacaaggcgctccccgcccccatagaaaagaccatctcgaaggcaaagggacaaccgcgggagccacaggtgtatacactcccccccagcagagatgagctcacaaagaatcaagtgtcgttgacctgcctggttaagggtttttatcccagtgacattgcggttgagtgggagtcaaatgggcagcccgagaacaactacaaaactacacctccggtgctcgattccgatggcagcttcttcttgtacagtaagctgaccgttgacaagtcgcgttggcaacagggaaacgtcttctcttgctcggtgatgcatgaggcactccacaaccattacactcaaaagagcctcagcctgtctcctggtaag

SEQ ID NO: 16073 - DNA, 1425 bp, synthetic construct
  misc_feature 1..1425: note = source = /note="Description of Artificial Sequence: Synthetic coding sequence"
  source 1..1425: mol_type = other DNA
atggcggtaatggctccaagaaccctggtactattgctgagcggcgcactggccctgactcagacctgggcccaggtgcagcttcagcagcctggggccgaactggtgaagcccggcgccagtgtaaaaatgtcctgtaaggccagtggctacactttcaccagttataatatgcactgggtaaaacagactcctgggcgcggcctcgaatggattggcgccatctatcccggcaatggagacacgagttataatcagaagttcaaggggaaagccaccctcacagctgacaagtctagttcaactgcttatatgcagctttcatccttaacaagtgaggattccgcggtctactactgcgcccgaagtacgtactacgggggcgactggtattttaatgtttggggcgcagggacaacagtgaccgtgagcgccgcgagtactaagggtccctcagtctttcctctcgcaccttcatcaaaatccacgagcgggggtaccgccgccctcgggtgcttagtgaaagactacttccccgagcccgtgacagtgtcatggaacagcggcgcattgacttcaggagtgcacacattccccgcagtgctgcagtcatccggcctctactccctgtcttccgttgtgaccgtgccctcatcaagcctggggacccagacttacatttgtaatgtgaatcacaaaccctcaaacaccaaagtcgataagaaagttgaaccaaaatcttgtgacaagacccatacctgtcccccatgtcctgctccagagttgcttggcggtccttccgtgtttctcttcccccccaagccaaaggacaccctgatgattagtcgcaccccagaggtcacctgtgtcgtggtagacgtaagtcatgaagatcctgaagtgaagtttaattggtatgtagatggtgtcgaagtacacaacgcaaagaccaaacctcgggaagagcaatacaactcaacctacagggttgtgtcggtactcaccgtactccatcaggattggctcaacgggaaggaatataaatgtaaggtaagcaacaaagcccttcccgcccctatcgagaagacaatttcaaaggcaaagggccaaccccgggaaccgcaagtatataccttgcccccaagcagagacgagcttaccaaaaaccaggtgagcttgacatgcctggtcaagggcttctaccccagcgacattgctgttgaatgggaatctaatggacagcctgaaaacaattataaaacaacaccccctgtgctcgatagtgacggcagtttttttctgtattccaagctcactgttgataaaagccggtggcagcaggggaatgtgttctcttgttccgtaatgcatgaagcactccacaatcattatacacagaaatcgctgtccctgtctcccggcaag

SEQ ID NO: 16074 - DNA, 1425 bp, synthetic construct
  misc_feature 1..1425: note = source = /note="Description of Artificial Sequence: Synthetic coding sequence"
  source 1..1425: mol_type = other DNA
atggctgtgatggcgcccaggacccttgtccttctgctgagcggagcactggcactgacgcagacttgggcacaggtgcaactgcaacaacctggtgcagaacttgtgaaaccaggggcctccgtgaagatgtcgtgtaaagcatccggctacacgtttacctcctacaatatgcattgggtcaaacagacccccggacgcggacttgaatggattggtgcaatatacccaggtaatggtgatactagctacaaccagaaattcaagggaaaggcaactcttaccgccgataagtcgtcgtcgaccgcctacatgcagttgtcgagcctgacctcggaagattccgccgtgtactactgcgcacgatcgacttactacggaggcgactggtatttcaacgtgtggggagcaggaacgacggtcaccgtgtccgccgcgtcgaccaaagggccgtcggtgtttccactggctccgtcgtcaaagtcgacgtcaggagggactgcagccctcggttgcctggtcaaggactactttcctgagcctgtcaccgtgtcgtggaattcaggagcactgacttccggcgtgcacacttttccagcagtcctgcaatcctccgggctctactccctgtcatcggtggtgactgtcccttcctcttcactcggaacgcaaacttacatttgtaacgttaaccataagccttcaaacaccaaagtggataagaaggtcgaacctaagtcgtgtgacaaaactcacacctgtccaccttgtcctgcaccagaacttctgggaggcccttcggtgtttctttttccacctaagccaaaagacacccttatgatttcccgtacgcccgaggtgacttgcgttgtcgtggacgtctcacacgaggacccagaagtgaagttcaactggtatgtggacggggtcgaggtccataacgcaaagactaagccgcgggaggagcaatacaattctacctatagggtcgtgagcgttttgactgtgctgcaccaagattggcttaatggcaaagagtacaagtgcaaagtgtcaaacaaagcactgccggcacctattgaaaagactatttcgaaggctaagggtcagcctcgtgaaccacaagtgtacaccctgccaccttcacgggatgaattgacgaagaatcaggtgtcactgacctgtctcgtcaaaggtttttacccatccgatatagctgtcgaatgggaatcaaatggccagccagagaacaactacaagaccactccccctgtccttgatagcgacggatcattcttcttgtactccaagctcactgtggataaatccagatggcaacaaggtaatgtcttttcatgttcggtgatgcatgaagcactccataaccattacactcagaaatccctgagcctttcgcctggtaaa

SEQ ID NO: 16075 - DNA, 1425 bp, synthetic construct
  misc_feature 1..1425: note = source = /note="Description of Artificial Sequence: Synthetic coding sequence"
  source 1..1425: mol_type = other DNA
atggcggttatggctcccagaacactagtactgcttctgtcaggagccctagcactcactcagacatgggcccaggtgcagctgcagcagccaggagctgaattagtaaaacctggagcatctgtaaaaatgtcttgcaaagcctcagggtatacattcacatcatacaacatgcactgggtgaaacagacacccggacgcggactcgaatggatcggggccatctatcctgggaatggagatacaagttataatcagaagttcaaaggaaaggccacactcacagcagataagtcttcatctacagcgtacatgcagctttcctcactgacatccgaggattcagcggtgtactattgtgcacggtctacatattatgggggggattggtatttcaacgtgtggggagccgggacaacagtaacagtgagtgctgcttccacaaaaggaccatctgtgtttcccctcgcacctagttccaaatctacttctggggggactgcggccctaggatgcctggtcaaagattattttccagaacccgtcacagtctcttggaactctggggcactcacatccggggtacatacattcccagccgtgctccagtcttccggactctatagtttaagttctgtggttacagtgcctagttcttctcttgggacacagacatatatctgcaacgttaaccacaagccttctaacacgaaagtggataagaaggttgaacccaagtcttgtgataaaactcacacttgtcccccttgtcctgcccctgagttactggggggaccctccgtattcctgtttcccccaaaacctaaagacacactgatgatttctagaacacctgaggtgacatgtgtggttgtcgatgtctcgcacgaagatcccgaagtgaaatttaattggtatgtagacggagttgaagtacacaacgccaaaacaaaaccccgggaggaacagtataatagtacatatcgcgttgtgagtgttctcactgtgctccaccaggattggctcaatgggaaggaatataagtgcaaggtgtctaacaaggcgcttcccgcccccatagaaaaaactatctctaaggctaaaggacagcctagggagccccaggtctatactcttccaccttctcgcgatgaattaactaaaaatcaggtcagtctcacatgcttggtgaaaggattttatcctagtgatattgctgtggaatgggagtctaatggacagcctgaaaataattataaaactactccacccgtgctggattcagatgggtcatttttcctttattccaagttaactgttgataaaagtaggtggcagcaggggaatgttttttcttgctctgtgatgcatgaagctctccataaccattacacacaaaaatctctcagtctgagtcctggaaaa

SEQ ID NO: 16076 - DNA, 1425 bp, synthetic construct
  misc_feature 1..1425: note = source = /note="Description of Artificial Sequence: Synthetic coding sequence"
  source 1..1425: mol_type = other DNA
atggctgtcatggcccccagaacactggtgctgctcctgtccggggccctagctctgactcagacttgggcccaagttcagctccagcagcctggcgccgagctggtcaagcctggcgcatccgttaagatgtcttgtaaagcttcaggatatacttttacatcttataacatgcattgggtgaaacagacccctggtaggggtctggaatggataggggcaatctatcctggtaacggggacacctcatataaccagaagttcaaaggcaaagccaccctaactgccgataagtcctcgtctaccgcatatatgcagcttagctccctgaccagcgaggacagcgctgtgtattattgtgcgcgcagtacatattatggcggagattggtacttcaatgtttggggtgctggaactactgtaacagtgagcgcggcttctactaaaggcccgtccgtttttccattggctcctagctccaagtctacatctggagggacggccgcattgggatgcctcgtaaaagactacttcccggaaccggtaacagtaagttggaatagcggggcactcacgagcggggtgcatactttcccagctgtgctgcagagttctgggctatatagcctttcatctgtcgttacagtcccctcaagttcgttgggaacccagacatatatctgcaacgtaaaccacaaaccatccaatactaaggtggataagaaagtggaacccaagtcctgtgacaaaacccacacatgtcctccatgtcctgcacctgaactgttgggagggccatctgtgtttctgtttcctccaaagcccaaagacactctgatgatctctaggacacctgaagtcacatgcgtggtcgtcgatgtttcgcatgaggacccagaggtgaagtttaattggtacgtggatggagtggaagtccacaacgctaagacgaagccaagggaggaacagtataattctacttatagggtagtcagtgtgctcacagtgctgcatcaggactggctgaacggcaaggagtataaatgtaaggtgagcaacaaagccttaccagctcccatcgaaaaaaccatctcgaaggcaaaagggcagccccgggagcctcaggtttacaccctgccaccttctcgcgacgaactcactaaaaatcaggtatcattgacgtgtctggtgaagggattctacccttcagatatcgctgtcgagtgggagagcaatggacagccagaaaacaattacaagactactccacctgtcttggattctgacgggagcttctttctatactccaaattaacagtggacaagtccaggtggcagcaaggcaacgtgttctcatgttctgtcatgcacgaagctctgcataaccactatacgcagaaatccctgtccttgtcccctgggaag

SEQ ID NO: 16077 - DNA, 1425 bp, synthetic construct
  misc_feature 1..1425: note = source = /note="Description of Artificial Sequence: Synthetic coding sequence"
  source 1..1425: mol_type = other DNA
atggctgtgatggcgcctagaaccctggtcctcctcctttcaggagctctggccctcacccaaacttgggcacaggtgcagctccagcagccgggcgccgaactcgtgaagccgggagcgtccgtcaaaatgtcatgtaaggcatccggctacacttttacttcgtacaacatgcattgggtgaaacaaaccccgggaagaggcctggaatggatcggtgccatctacccggggaacggagatacctcctacaatcagaagttcaagggaaaggcgactctgactgctgacaagtcatcctcgactgcttacatgcagctgtcctcgctgaccagcgaagattcggcagtctactactgcgcccgctcgacctactacggtggggattggtacttcaacgtgtggggcgctggcactactgtgactgtgtccgcggcttccactaaggggcccagcgtgttccctctcgcgccaagctccaaatctacctcaggcggaactgcagcccttggatgcctggtgaaggattacttcccggagccagtgactgtgtcgtggaactcgggtgcgttgacgtcgggggtgcatacctttccagcggtgctccagtcctcagggctttactccctgagttcggtggttacggtgccttcgtcatcccttgggacgcagacttacatctgtaacgttaaccacaagccgtccaacacgaaggtggacaagaaagttgagccgaagtcgtgcgacaagacgcacacgtgccctccgtgtccggctccggaacttctgggcggtccgagcgtgttcctgttcccgccgaaacctaaggataccctcatgatctcgcggactccagaagtgacctgcgtggtcgtcgacgtgtcacacgaggaccctgaagtgaagtttaactggtacgtggacggcgtggaagtgcataacgccaaaacgaagccgcgcgaagagcaatacaactccacctaccgggtcgtgtccgtgctgacggtcctgcaccaggactggctgaacggaaaagagtataagtgtaaggtcagcaataaggcgctgcccgcgccgattgaaaagaccatctccaaggccaagggacaaccgcgcgagccacaggtgtacactctcccgccgtcaagagatgagctgactaagaaccaagtctcactcacttgcctggtcaaaggattctatccgtccgatatagcagtcgaatgggagtcgaatggacagcccgaaaacaattacaagactactcccccggtcctcgactccgatggcagcttcttcctgtactcgaagctcaccgtggacaagagccggtggcaacagggaaatgtgttctcctgctcggtcatgcatgaggctttgcataatcactacactcagaagagcctgtccctgtcaccgggtaag

SEQ ID NO: 16078 - DNA, 1425 bp, synthetic construct
  misc_feature 1..1425: note = source = /note="Description of Artificial Sequence: Synthetic coding sequence"
  source 1..1425: mol_type = other DNA
atggcagtaatggcgccacggacattggtgcttcttttgagtggagctttggccctcactcaaacttgggctcaagttcaactccagcagcctggagccgaactcgtcaaaccgggtgctagtgttaagatgtcgtgtaaagcttctggatatactttcacatcgtataacatgcattgggttaagcagactccaggaaggggattagaatggataggcgctatctatccaggaaatggagatactagttacaatcagaaatttaagggaaaggctacactgaccgctgacaaatctagctccactgcatacatgcaactatcaagcctgacaagcgaggattcagctgtgtattattgtgctcgatcaacatactacggaggagactggtattttaacgtctggggagcaggtaccaccgtgacagtcagtgcagctagcacaaaaggaccatccgtgtttccacttgctccgtcatcaaaatcaactagtggagggacagctgccttgggctgcctcgtgaaagattacttcccagagccggttacagtgagttggaactcaggtgctcttacttcaggagtccatacgttccctgccgttttgcagtcctcaggattatattcactgtcgtcagttgtcacagtcccgagttcctcgcttggaacacaaacatatatttgtaacgtgaatcataagccgagtaatacgaaagtggataaaaaggttgagcctaagtcgtgcgacaaaacgcacacttgccccccatgtccagctccggaactgctcggcggtccatcagtttttctcttccccccgaaaccaaaagatacactaatgataagtaggactcctgaagttacttgtgttgttgttgatgtcagccacgaggatccagaagtgaaattcaactggtacgtcgatggggtagaggtacacaatgctaagacaaagcctcgagaagaacagtataactcaacttaccgtgttgtttcggtcctaacagtgttgcaccaagattggcttaatggaaaagaatataagtgcaaagtctctaacaaagcattgccagcaccaattgaaaagacaatctcaaaagcaaaaggacagccacgcgagccacaagtttacactcttccgccatccagggatgaacttactaagaaccaagtctcactaacctgtttggtcaaaggcttctacccttcggatatagctgttgagtgggagtcaaatggccagccagaaaataattataaaacaactccgccagttttggattcggatggtagctttttcctttattcaaagcttacagttgataaaagcagatggcaacaaggaaatgtgttcagttgtagcgtgatgcatgaagcactgcacaatcattatacacaaaagtcattgtctttatctccaggaaaa

SEQ ID NO: 16079 - DNA, 1425 bp, synthetic construct
  misc_feature 1..1425: note = source = /note="Description of Artificial Sequence: Synthetic coding sequence"
  source 1..1425: mol_type = other DNA
atggcagtgatggcaccgcgaacgctcgtcctgctgctctcgggagcactggctttgacccaaacctgggcgcaggtccagctgcagcagccaggagcggaactggtcaagccgggcgccagcgtgaaaatgtcgtgcaaggcttctggatacaccttcactagctacaatatgcactgggtcaagcagacgccgggtcgcggcctggagtggatcggggccatctacccggggaacggagatacctcgtacaaccaaaagttcaaaggaaaggcaactctcactgcggataaatcttcatcgactgcctacatgcagctgtcatcgctgacctcagaagattccgctgtctactactgtgcacgtagcacctattacggaggcgactggtatttcaatgtctggggagcgggaactaccgttaccgtgagcgcggcctccaccaaggggccgtcggtgtttccgcttgcgccgtcgtccaagtcgacctcggggggaactgccgcactcgggtgcctggtgaaagactactttccagagccagtgaccgtgtcgtggaactcgggagctcttacttcaggtgtgcatactttcccggccgtgctgcaatcgtcgggcctgtactccttgagctccgtggtgactgtccccagctcatcactcggaacgcagacctacatttgcaacgtcaatcacaaaccgtcgaacactaaagttgacaaaaaggtcgagccaaagagctgtgacaagactcatacgtgtccgccctgcccagcaccggaattgcttggcggccccagtgtgttcctgttcccccctaagcctaaagatacgctcatgatctctcggaccccagaagtcacttgcgtcgtggtggacgtttcgcacgaagatccggaagtgaagttcaactggtacgtggacggtgtagaagtgcataacgcgaaaacgaagcctcgcgaagaacagtacaactccacttaccgggtagtatcggtcctgactgtgcttcaccaggactggctgaatggaaaagaatacaagtgcaaagtgtccaacaaggccctgccggcgccaattgagaaaaccatcagcaaggccaaggggcagccaagagagcctcaagtttatactcttcctccctcacgcgacgagttgactaagaatcaagtgtccctcacctgcttggtcaaggggttctatccgtcggatatcgccgtggagtgggaatcgaacggccagccagagaataactacaagaccaccccgccggtcctggactccgacggctccttcttcctctactcaaagctgactgtcgataagtcaagatggcagcaaggaaacgtctttagctgctcggtgatgcacgaggctctgcacaatcattacactcaaaagtccctctcacttagcccagggaaa

SEQ ID NO: 16080 - DNA, 1425 bp, synthetic construct
  misc_feature 1..1425: note = source = /note="Description of Artificial Sequence: Synthetic coding sequence"
  source 1..1425: mol_type = other DNA
atggcggtgatggcacctcgtacccttgtgttgcttctctcaggggccctcgcactgacccaaacttgggcacaggtccagctccagcaaccaggggcagaacttgtcaagccgggagcatcagtcaagatgagctgtaaggcatccggttacacttttacttcgtacaacatgcattgggtgaagcagacccctggaaggggccttgaatggattggagctatctacccaggcaacggggacacgagctacaatcagaaattcaagggaaaagcaactcttaccgcagataaatcgtcgtcaaccgcctacatgcaactttcatccctgacttccgaagattccgcggtgtactactgtgcaagatcgacctactacggaggtgactggtacttcaacgtctggggtgcgggtactactgttaccgtctccgcagcatccaccaaaggaccatcggtgtttcctcttgcgccttcgtctaagtccacttccggcggaactgcggcactgggatgcctggtgaaggactactttcctgaacctgtgaccgtgtcgtggaactccggggcactgacctccggcgtgcataccttccctgcagtgctccaatcctcgggactgtactcgctgtcatctgtggtgacggtgcccagctcctcactgggaacccagacttacatttgcaatgtgaatcataagccgtccaataccaaagtcgacaagaaggtggagcctaagtcgtgtgataaaacccacacgtgtcccccttgtcctgcacctgaactccttgggggcccttcggtgttcctgttccctccgaagccaaaggacaccctgatgatttccagaacgcccgaggtgacttgtgtcgtggtggacgtctcgcacgaagatccggaggtcaaattcaactggtacgtggatggtgtcgaagtgcataacgccaaaacgaagcctcgcgaggaacagtacaactccacttaccgcgtcgtctctgtgctcactgtgctgcatcaagattggcttaacggcaaggagtacaagtgcaaggtgagcaataaggcactgcctgcaccaatcgaaaagaccattagcaaggcaaagggacagccccgtgaaccccaagtgtacaccctcccaccctcccgggatgagctcactaagaaccaggtgtcactgacctgtctggtcaaggggttttatccatctgatatcgccgtggaatgggaatcgaacggccaacctgaaaacaattacaaaaccacccctcccgtccttgattctgatggtagctttttcctgtactccaaacttaccgtcgacaagtcgaggtggcagcagggaaacgtgtttagctgttcagtaatgcacgaagctcttcataatcattacactcagaaatccctgtccctgagcccaggtaaa

SEQ ID NO: 16081 - DNA, 1425 bp, synthetic construct
  misc_feature 1..1425: note = source = /note="Description of Artificial Sequence: Synthetic coding sequence"
  source 1..1425: mol_type = other DNA
atggcagtcatggccccccgcactttggtgctcctgctgtcaggagcccttgcgcttactcagacgtgggctcaggttcagctccagcaaccaggcgcagaactggtcaaacctggggcctcggtcaagatgagctgcaaggcgtcgggatatacctttacgagctacaatatgcattgggtgaaacaaacccctggaagaggccttgagtggatcggtgcgatctaccccgggaacggggacacttcgtacaaccagaagttcaaggggaaggccaccctgactgcagataagtcgtcaagtactgcatacatgcaactttccagcttgacctccgaggacagcgcagtttactattgtgctagatcgacttattacggcggagattggtactttaacgtctggggagcagggactaccgtgaccgtctcggcagcaagcactaagggaccgtcggtgtttcccctcgccccaagctctaagagcaccagcggtggaactgctgcacttggatgcttggtgaaggattacttcccggagccggtcactgtttcctggaattccggagcacttacttccggggttcacaccttccccgcagtcctgcagtcatcgggcctgtacagcttgtcctccgtggtcactgtaccgtcgtcgtccctcggtacgcagacctacatatgtaatgtcaatcataagccatccaatactaaggtcgataagaaagtggaaccaaaaagctgtgacaagacccacacttgtccaccttgtcctgcacctgaactgctcggtggacccagcgtatttctgtttccgcctaagcctaaagataccctgatgatttcccggacgccagaagtgacctgcgtggtggtggacgtcagtcatgaggaccctgaagtcaaattcaactggtacgtggatggtgttgaggtgcataacgcgaaaaccaagcctagagaagaacaatacaactcaacttacagggttgtctcggtgcttacggtccttcaccaggactggcttaacggtaaggagtacaaatgtaaggtatccaacaaggccctgccagcacccattgaaaaaaccatatccaaggccaagggacagcctcgcgaaccacaagtgtacaccctcccgccctcgcgtgatgaactgactaagaatcaagtctcactgacctgccttgttaaaggtttttacccctccgatattgcagttgagtgggagtcgaacggacagcctgaaaacaattacaagactacgccccctgttctggattcagacggctcgtttttcctttactcaaaacttactgtggataaatcacggtggcaacaaggtaacgtgttttcgtgttcagtcatgcatgaggctctccacaaccattacacccaaaagtcgctgagcctttccccaggcaag

SEQ ID NO: 16082 - DNA, 1425 bp, synthetic construct
  misc_feature 1..1425: note = source = /note="Description of Artificial Sequence: Synthetic coding sequence"
  source 1..1425: mol_type = other DNA
atggccgttatggcaccgcgcaccctcgtgcttctgctttctggagccctcgcgctcacccaaacctgggctcaggtgcaactgcagcagcccggagcggaactggtcaaacccggtgccagcgtgaaaatgtcgtgcaaggcatctggatacactttcactagctacaacatgcattgggtgaagcagactccagggagaggcctggagtggatcggagccatttacccaggaaacggggatacgtcgtacaaccagaaattcaagggcaaggctactcttactgcggacaagagcagctcgaccgcctacatgcaactctcatcactgacctcagaggactcagccgtgtactattgtgctagatcaacctactatgggggtgactggtacttcaacgtgtggggagcaggaaccactgtgaccgtgtccgcagcatcgaccaagggcccgtcggttttcccgctggccccgtcctcgaaatcgaccagcggcggaactgcggcgcttggctgcctggtcaaggactactttccggagccggtgaccgtctcctggaacagcggagcactcacctcaggagtgcatacttttccggctgtcctgcagtcgtccgggctgtactcactgtcgtccgtcgtgacggtgccgtcgagttccctcggaactcaaacctacatctgcaatgtcaaccacaagcccagcaatactaaggtcgataagaaggtggagccaaagtcgtgtgacaagactcatacctgcccgccttgcccggccccggaactgctcggcggaccatcggtgttcctgttccccccgaaaccaaaggataccttgatgatcagccgcacccctgaagtgacctgcgtggtcgtcgatgtgtcccatgaagatcccgaagtgaagttcaactggtatgtggacggagtggaagtacacaatgccaagacgaaaccacgggaggagcaatacaacagcacctaccgcgtcgtgtccgtgctgacggttttgcaccaggactggctgaatggaaaagaatacaagtgcaaagtgtccaataaggccctgccagcgcctatcgaaaagaccatctccaaagccaagggtcagccacgggagcctcaggtctacactctcccgcctagcagggacgaactcactaagaatcaggtgtccctgacctgcctggtgaagggcttctacccatcggacattgctgtcgagtgggagtccaacgggcaacctgaaaacaattacaaaactactccgccggtcttggattcggatggtagcttctttctgtactcaaaactcactgtggacaagtcccggtggcagcagggcaacgtgttttcctgttctgtgatgcacgaagcgttgcacaaccactacacgcaaaagtcactcagcctgtcacctggaaag

SEQ ID NO: 16083 - DNA, 1425 bp, synthetic construct
  misc_feature 1..1425: note = source = /note="Description of Artificial Sequence: Synthetic coding sequence"
  source 1..1425: mol_type = other DNA
atggcggtcatggcccccagaactttggtgctgctcctgtcgggagcattggcactgacccaaacctgggcgcaggttcagcttcaacaaccaggtgcagaactggtgaaaccaggagccagcgtgaagatgtcctgtaaggcctccgggtacaccttcacttcgtacaatatgcactgggtcaagcaaacgcccggtaggggcctggaatggattggcgcaatttaccccggaaacggtgatacgagctacaaccagaaattcaaaggtaaggcgactctgactgcagataagagctcctcgaccgcatacatgcagctctcgagcctgaccagtgaagattccgccgtgtactactgtgcacgtagcacttactacgggggtgattggtacttcaatgtgtggggagcaggaacgaccgtgactgtgagcgcagccagtactaaggggccttccgtgttccccctcgcgccatccagcaagtccacttcagggggaactgcagcactcggatgtctcgtcaaggactacttccctgaacccgtcaccgtgtcgtggaattccggagcacttacttcgggagtgcatacctttccagccgtcttgcagagctctggactgtactcactgtcaagcgtggtgacggtcccgtcatcctctctgggaacccagacctacatctgtaatgtgaatcacaaaccatcgaacacgaaggtggacaagaaggtcgaacccaagtcgtgtgataagactcacacctgccctccctgtcctgcgcctgagctccttgggggtccatcggtctttctgtttccgccgaagcctaaggatactttgatgatctcgagaacccccgaagtcacctgtgttgtggtggacgtgtcgcatgaagatccagaagtgaagtttaactggtacgtggacggagtcgaggttcacaacgccaagacgaagcctcgtgaagaacagtacaattccacttaccgtgtcgtgagcgtccttactgtgctccaccaggactggcttaacggaaaagaatacaagtgtaaagtctctaacaaggcacttcctgcccctattgagaaaactatctccaaggcaaaggggcaaccacgcgaaccccaggtgtacacccttccgccttcccgggatgaacttaccaaaaaccaagtctcactgacttgtcttgtcaaggggttctacccatcggatatcgctgtcgaatgggagtcgaacggccagcctgagaacaattacaaaactacccctcctgttctggatagcgacggctcgtttttcctgtacagcaagctgactgtggataagtcaaggtggcaacaaggcaatgtcttttcgtgcagcgtgatgcatgaagcactgcataatcattacacccagaaaagcctttcgctgtcccccggaaaa

SEQ ID NO: 16084 - DNA, 1425 bp, synthetic construct
  misc_feature 1..1425: note = source = /note="Description of Artificial Sequence: Synthetic coding sequence"
  source 1..1425: mol_type = other DNA
atggcagtgatggccccccggacccttgttctgctgctctccggggctctcgctctgacgcagacgtgggcacaggtgcagctgcaacagccaggcgcagagctggtcaaacccggcgcgtccgtcaagatgtcgtgtaaggcgtccggttacaccttcacttcctacaacatgcattgggtcaagcaaaccccgggccgagggcttgagtggatcggtgcgatctacccggggaacggcgataccagctacaaccagaaattcaaagggaaggccaccttgacggctgacaaaagctcctccactgcgtacatgcagctttcgtccctgacttccgaggacagcgccgtgtactactgcgcacgcagcacttactacggaggagattggtatttcaacgtgtggggagccggtaccactgtgactgtttcagctgctagcacgaagggcccatcggtgttccccctggcaccgtcgtcaaagagcacttccgggggaaccgctgcccttggctgcctggtcaaagactactttccagagccagtgaccgtgtcatggaattccggtgcattgacctcaggcgtgcacaccttccccgccgtgctgcagtcctcgggactgtattcattgtcctcggtggtgaccgtgccgtcgagctccctcggcacccaaacctacatctgcaacgtcaaccacaagccgtcaaacaccaaagtggacaagaaggtcgaaccgaagagctgcgacaaaactcatacgtgtccgccatgccccgctcctgaactgttgggaggaccatcggtttttctgttcccaccaaagccgaaggacactctcatgatctcgcgaacccccgaagtcacttgcgtggtcgtggatgtctcccatgaggatccggaagtcaagttcaactggtatgtggacggtgtcgaagtgcacaatgctaagactaagccgcgcgaagagcagtacaatagcacttaccgggtcgtctccgtcctgactgtgctccaccaagactggcttaacggaaaggaatacaagtgcaaagtctcaaacaaggctctgcctgccccgatcgaaaaaaccatcagcaaggcgaagggacagcccagggagccgcaggtgtacacccttccaccctcgcgcgatgagctgaccaaaaaccaggtgagcttgacttgcctcgtgaagggtttttacccgtcggacatcgctgtggagtgggaatcgaatggacagccggagaataactacaaaactaccccgcctgtcctggatagcgacggctctttctttctctatagcaagctgactgtagataaatcgcggtggcagcaaggcaacgtctttagttgttcggtcatgcatgaggcgctgcacaaccactacactcaaaagtccctgtcgctgagcccgggaaag

SEQ ID NO: 16085 - DNA, 1425 bp, synthetic construct
  misc_feature 1..1425: note = source = /note="Description of Artificial Sequence: Synthetic coding sequence"
  source 1..1425: mol_type = other DNA
atggcggtaatggcgccacgcactctagtcctcctcctgtcgggagctctggccctcacccagacctgggcgcaagtgcaactccaacagcccggcgctgagctagtcaagcctggagcctcagtcaagatgagttgtaaagcaagcggctacacattcaccagttataatatgcactgggtcaagcaaacacctggacgtgggcttgaatggatcggcgccatctaccccggaaatggcgacacctcatacaatcaaaagtttaagggcaaggctactttaacagccgacaagagttctagcaccgcttatatgcagctgtccagtctaactagcgaggattcggcggtttactattgtgctcgctcgacctattacggtggggattggtacttcaatgtctggggggctggaaccacagttaccgtgtcagccgcaagtacaaagggtcctagtgtcttccctctggctccatcaagcaagagcacatcggggggtactgctgcgttaggctgcttagttaaggactacttccccgagcccgtgacggtctcctggaattccggcgccttgacttcgggagttcacaccttcccagcggttcttcagagttcaggtttgtactcactgtcctcggtcgtgactgttccatcgtcttctctggggactcaaacctatatctgtaacgtcaaccataaacctagtaacacaaaagtagataagaaggttgagcctaagtcatgcgataaaactcacacttgccctccatgtcctgcaccagagttgctcggaggacctagtgtttttttgtttccgcccaaacccaaagatacccttatgatatccaggacgcctgaagtgacgtgcgtcgttgtagatgtctctcatgaggatcccgaggttaaatttaattggtacgtcgacggagtcgaggtgcacaacgccaagacgaagccacgagaggagcagtacaactccacctatcgagtagtcagtgtgctgactgtcttgcatcaggattggctcaatggaaaggaatacaagtgtaaagtctcgaacaaagctttgccagctccaattgaaaaaacgatctcaaaggctaagggacagccgagagaaccacaagtgtatacattaccgccgtctcgcgacgagttgacgaagaaccaagtgtcactaacttgtctggtgaaaggcttttatccttccgatatagcagttgagtgggagtcgaacgggcagcctgaaaacaattataagacgacaccgcccgttctcgattctgacggtagtttcttcctttactctaagctcacggtcgacaagtcgcgatggcagcagggcaacgttttctcctgctcagttatgcatgaagcccttcataatcattatactcaaaaaagcttgagtctgtcgcctggaaag

SEQ ID NO: 16086 - DNA, 1425 bp, synthetic construct
  misc_feature 1..1425: note = source = /note="Description of Artificial Sequence: Synthetic coding sequence"
  source 1..1425: mol_type = other DNA
atggcagttatggcacctcgaaccctggtgctgctcctgagcggtgcccttgcgcttactcagacctgggcccaagtgcagcttcaacagcccggagcagaacttgtgaagcccggggcttcggtgaagatgtcctgtaaggcatcgggatacacttttacttcctacaatatgcattgggtcaagcagaccccgggacgcggtctggagtggattggtgccatatatcccggaaacggagatacctcgtacaaccagaagtttaagggtaaggcaacgttgactgcagacaagtcgtcgtcgactgcatacatgcagctttcgtcccttacctcggaagattccgctgtctactactgcgcaagaagcacctactacggcggagactggtacttcaacgtgtggggcgcaggtaccaccgtgaccgtgagcgcagcctcgaccaaaggaccctccgtttttcctcttgcacctagctcgaaatctacctcgggtggaaccgcagcacttgggtgtcttgtcaaagattacttcccagaacctgtcaccgtgtcatggaactcgggtgcactcacctcgggagtccatactttccctgccgtcctccagtcgtcagggctttactccctgagctcagtggtgactgtccctagctcgagcctgggaactcaaacgtacatatgcaacgtgaaccataagccatccaacactaaggtggacaagaaggtggaaccgaagtcctgtgataagactcatacgtgccccccgtgtcctgcacccgaactcctcgggggtccttcggtgtttctctttccccctaagccaaaggataccctgatgatttcgagaactccagaagtgacttgtgtggtcgtggatgtgagccacgaggatccagaagtgaagtttaactggtacgtcgatggcgtggaggttcataatgcaaagaccaagccacgggaagagcagtacaactcaacttacagggtggtgagcgtgctgactgtcctgcatcaggactggctgaacggaaaagaatacaagtgtaaagtctctaacaaggcactgcccgcccctattgaaaagaccatttccaaggcgaaaggacaacctcgtgaacctcaagtgtacaccctcccgccatcgcgggatgagctgacgaagaaccaagtctccctgacgtgcctggtgaagggattctacccatcagatatagccgtcgaatgggagagcaatggacaaccagaaaacaattacaagaccaccccacctgtgttggactcggacggctccttcttcctttactccaagctgacggtggacaagtcgcggtggcaacaagggaatgtctttagctgttccgtaatgcatgaagctctgcataaccactacacccagaagtccctgagcctttccccagggaaa

SEQ ID NO: 16087 - DNA, 1425 bp, synthetic construct
  misc_feature 1..1425: note = source = /note="Description of Artificial Sequence: Synthetic coding sequence"
  source 1..1425: mol_type = other DNA
atggctgtgatggcccctcgtacgctcgtgctattgttgtccggagctctcgcactgacccagacatgggcgcaagtgcagttgcagcagccgggggccgagcttgtaaagcctggagcttcggtgaagatgagttgtaaggcttctggctatacattcacctcttataacatgcactgggttaaacaaactccggggagggggctggagtggattggcgctatttatcccggcaacggggacactagctataatcagaagttcaaggggaaggccactcttacagctgacaaaagctcctctacagcgtatatgcagctctccagtctcaccagcgaggactctgctgtgtattactgcgcaagatccacttattacggaggagactggtattttaacgtctggggagcaggtaccactgtgaccgttagcgccgcgtcaaccaagggtccgtccgtttttccactcgcccctagttccaagtccacctctggagggaccgctgccctggggtgtcttgtcaaagactattttccggaaccggtgaccgtgagctggaacagtggagcccttacttctggcgtgcacacatttcctgcagtattacagtcaagtggactgtattctctctcctccgtggtgaccgtacccagctctagcttgggtacccagacttacatctgtaatgtgaatcataagccatctaataccaaggtggataaaaaggttgagcccaaatcctgcgacaaaacccacacctgccctccctgtcccgcgcccgagttattaggtggcccgagcgtctttctgttcccccctaagcctaaggatactctgatgatatctcgaacaccagaggtgacgtgtgtagtcgtggacgtgtcccatgaagatccggaggtgaaatttaattggtacgttgatggtgtggaggtccacaatgccaagaccaaaccaagggaggagcagtacaattctacttacagggtggtctcggtgctgaccgttttgcaccaggactggctgaacgggaaggaatacaagtgtaaagtcagcaacaaggcattgcctgctcctattgaaaagactatctcaaaagccaagggtcagcctcgagagccccaggtctacactctcccaccctcccgggacgagttgacaaagaaccaggtgtccctcacttgtttggtcaagggcttttacccatctgatattgccgtggagtgggaatctaacggtcagcctgaaaataactacaaaaccaccccaccggtcctggattccgacggctcctttttcttgtactccaagctgaccgtggacaagagtcgatggcagcaggggaatgtcttctcctgttccgtgatgcacgaagccctccacaaccactacacccaaaagtctctctccttgtcgccaggtaag

SEQ ID NO: 16088-16091 - skipped (4 entries)

SEQ ID NO: 16092 - protein, 6 aa, Homo sapiens
LVPRGS

SEQ ID NO: 16093 - protein, 4 aa, Homo sapiens
LVPR

SEQ ID NO: 16094 - protein, 4 aa, Homo sapiens
  VARIANT 1: note = /replace="Phe" or "Gly" or "Ile" or "Leu" or "Thr" or "Val" or "Met"
  VARIANT 2: note = /replace="Phe" or "Gly" or "Ile" or "Leu" or "Thr" or "Val" or "Trp"
  REGION 1..2: note = misc_feature - /note="Residues given in the sequence have no preference with respect to those in the annotations for said positions"
AAPR

SEQ ID NO: 16095 - protein, 4 aa, Homo sapiens
IEGR

SEQ ID NO: 16096 - protein, 4 aa, Homo sapiens
IDGR

SEQ ID NO: 16097 - protein, 4 aa, Homo sapiens
AEGR

SEQ ID NO: 16098 - protein, 4 aa, Homo sapiens
  VARIANT 1: note = /replace="Phe" or "Gly" or "Ile" or "Leu" or "Thr" or "Val" or "Met"
  VARIANT 2: note = /replace="Glu"
  REGION 1..2: note = misc_feature - /note="Residues given in the sequence have no preference with respect to those in the annotations for said positions"
ADGR

SEQ ID NO: 16099 - DNA, 615 bp, Homo sapiens
  source 1..615: mol_type = genomic DNA
atggctggacctgccacccagagccccatgaagctgatggccctgcagctgctgctgtggcacagtgcactctggacagtgcaggaagccacccccctgggccctgccagctccctgccccagagcttcctgctcaagtgcttagagcaagtgaggaagatccagggcgatggcgcagcgctccaggagaagctgtgtgccacctacaagctgtgccaccccgaggagctggtgctgctcggacactctctgggcatcccctgggctcccctgagcagctgccccagccaggccctgcagctggcaggctgcttgagccaactccatagcggccttttcctctaccaggggctcctgcaggccctggaagggatctcccccgagttgggtcccaccttggacacactgcagctggacgtcgccgactttgccaccaccatctggcagcagatggaagaactgggaatggcccctgccctgcagcccacccagggtgccatgccggccttcgcctctgctttccagcgccgggcaggaggggtcctggttgcctcccatctgcagagcttcctggaggtgtcgtaccgcgttctacgccaccttgcccagccctga

SEQ ID NO: 16100 - DNA, 800 bp, synthetic construct
  misc_feature 1..800: note = source = /note="Description of Artificial Sequence: Synthetic transcript sequence"
  source 1..800: mol_type = other DNA
taatacgactcactatagggaaataagagagaaaagaagagtaagaagaaatataagagccaccatggctggacctgccacccagagccccatgaagctgatggccctgcagctgctgctgtggcacagtgcactctggacagtgcaggaagccacccccctgggccctgccagctccctgccccagagcttcctgctcaagtgcttagagcaagtgaggaagatccagggcgatggcgcagcgctccaggagaagctgtgtgccacctacaagctgtgccaccccgaggagctggtgctgctcggacactctctgggcatcccctgggctcccctgagcagctgccccagccaggccctgcagctggcaggctgcttgagccaactccatagcggccttttcctctaccaggggctcctgcaggccctggaagggatctcccccgagttgggtcccaccttggacacactgcagctggacgtcgccgactttgccaccaccatctggcagcagatggaagaactgggaatggcccctgccctgcagcccacccagggtgccatgccggccttcgcctctgctttccagcgccgggcaggaggggtcctggttgcctcccatctgcagagcttcctggaggtgtcgtaccgcgttctacgccaccttgcccagccctgaagcgctgccttctgcggggcttgccttctggccatgcccttcttctctcccttgcacctgtacctcttggtctttgaataaagcctgagtaggaaggcggccgctcgagcatgcatctaga

SEQ ID NO: 16101 - DNA, 800 bp, synthetic construct
  misc_feature 1..800: note = source = /note="Description of Artificial Sequence: Synthetic transcript sequence"
  source 1..800: mol_type = other DNA
taatacgactcactatagggaaataagagagaaaagaagagtaagaagaaatataagagccaccatggccggtcccgcgacccaaagccccatgaaacttatggccctgcagttgctgctttggcactcggccctctggacagtccaagaagcgactcctctcggacctgcctcatcgttgccgcagtcattccttttgaagtgtctggagcaggtgcgaaagattcagggcgatggagccgcactccaagagaagctctgcgcgacatacaaactttgccatcccgaggagctcgtactgctcgggcacagcttggggattccctgggctcctctctcgtcctgtccgtcgcaggctttgcagttggcagggtgcctttcccagctccactccggtttgttcttgtatcagggactgctgcaagcccttgagggaatctcgccagaattgggcccgacgctggacacgttgcagctcgacgtggcggatttcgcaacaaccatctggcagcagatggaggaactggggatggcacccgcgctgcagcccacgcagggggcaatgccggcctttgcgtccgcgtttcagcgcagggcgggtggagtcctcgtagcgagccaccttcaatcatttttggaagtctcgtaccgggtgctgagacatcttgcgcagccgtgaagcgctgccttctgcggggcttgccttctggccatgcccttcttctctcccttgcacctgtacctcttggtctttgaataaagcctgagtaggaaggcggccgctcgagcatgcatctaga

SEQ ID NO: 16102 - RNA, 758 nt, synthetic construct
  misc_feature 1..758: note = source = /note="Description of Artificial Sequence: Synthetic transcript sequence"
  source 1..758: mol_type = other RNA
gggaaataagagagaaaagaagagtaagaagaaatataagagccaccatggccggtcccgcgacccaaagccccatgaaacttatggccctgcagttgctgctttggcactcggccctctggacagtccaagaagcgactcctctcggacctgcctcatcgttgccgcagtcattccttttgaagtgtctggagcaggtgcgaaagattcagggcgatggagccgcactccaagagaagctctgcgcgacatacaaactttgccatcccgaggagctcgtactgctcgggcacagcttggggattccctgggctcctctctcgtcctgtccgtcgcaggctttgcagttggcagggtgcctttcccagctccactccggtttgttcttgtatcagggactgctgcaagcccttgagggaatctcgccagaattgggcccgacgctggacacgttgcagctcgacgtggcggatttcgcaacaaccatctggcagcagatggaggaactggggatggcacccgcgctgcagcccacgcagggggcaatgccggcctttgcgtccgcgtttcagcgcagggcgggtggagtcctcgtagcgagccaccttcaatcatttttggaagtctcgtaccgggtgctgagacatcttgcgcagccgtgaagcgctgccttctgcggggcttgccttctggccatgcccttcttctctcccttgcacctgtacctcttggtctttgaataaagcctgagtaggaag

SEQ ID NO: 16103 - RNA, 854 nt, synthetic construct
  misc_feature 1..854: note = source = /note="Description of Artificial Sequence: Synthetic transcript sequence"
  source 1..854: mol_type = other RNA
gggaaataagagagaaaagaagagtaagaagaaatataagagccaccatggtatccaagggggaggaggacaacatggcgatcatcaaggagttcatgcgattcaaggtgcacatggaaggttcggtcaacggacacgaatttgaaatcgaaggagagggtgaaggaaggccctatgaagggacacagaccgcgaaactcaaggtcacgaaagggggaccacttcctttcgcctgggacattctttcgccccagtttatgtacgggtccaaagcatatgtgaagcatcccgccgatattcctgactatctgaaactcagctttcccgagggattcaagtgggagcgggtcatgaactttgaggacgggggtgtagtcaccgtaacccaagactcaagcctccaagacggcgagttcatctacaaggtcaaactgcgggggactaactttccgtcggatgggccggtgatgcagaagaaaacgatgggatgggaagcgtcatcggagaggatgtacccagaagatggtgcattgaagggggagatcaagcagagactgaagttgaaagatgggggacattatgatgccgaggtgaaaacgacatacaaagcgaaaaagccggtgcagcttcccggagcgtataatgtgaatatcaagttggatattacttcacacaatgaggactacacaattgtcgaacagtacgaacgcgctgagggtagacactcgacgggaggcatggacgagttgtacaaatgataagctgccttctgcggggcttgccttctggccatgcccttcttctctcccttgcacctgtacctcttggtctttgaataaagcctgagtaggaag

SEQ ID NO: 16104 - DNA, 896 bp, synthetic construct
  misc_feature 1..896: note = source = /note="Description of Artificial Sequence: Synthetic transcript sequence"
  source 1..896: mol_type = other DNA
taatacgactcactatagggaaataagagagaaaagaagagtaagaagaaatataagagccaccatggtatccaagggggaggaggacaacatggcgatcatcaaggagttcatgcgattcaaggtgcacatggaaggttcggtcaacggacacgaatttgaaatcgaaggagagggtgaaggaaggccctatgaagggacacagaccgcgaaactcaaggtcacgaaagggggaccacttcctttcgcctgggacattctttcgccccagtttatgtacgggtccaaagcatatgtgaagcatcccgccgatattcctgactatctgaaactcagctttcccgagggattcaagtgggagcgggtcatgaactttgaggacgggggtgtagtcaccgtaacccaagactcaagcctccaagacggcgagttcatctacaaggtcaaactgcgggggactaactttccgtcggatgggccggtgatgcagaagaaaacgatgggatgggaagcgtcatcggagaggatgtacccagaagatggtgcattgaagggggagatcaagcagagactgaagttgaaagatgggggacattatgatgccgaggtgaaaacgacatacaaagcgaaaaagccggtgcagcttcccggagcgtataatgtgaatatcaagttggatattacttcacacaatgaggactacacaattgtcgaacagtacgaacgcgctgagggtagacactcgacgggaggcatggacgagttgtacaaatgataagctgccttctgcggggcttgccttctggccatgcccttcttctctcccttgcacctgtacctcttggtctttgaataaagcctgagtaggaaggcggccgctcgagcatgcatctaga

SEQ ID NO: 16105 - RNA, 725 nt, synthetic construct
  misc_feature 1..725: note = source = /note="Description of Artificial Sequence: Synthetic transcript sequence"
  source 1..725: mol_type = other RNA
gggaaataagagagaaaagaagagtaagaagaaatataagagccaccatgggagtgcacgagtgtcccgcgtggttgtggttgctgctgtcgctcttgagcctcccactgggactgcctgtgctgggggcaccacccagattgatctgcgactcacgggtacttgagaggtaccttcttgaagccaaagaagccgaaaacatcacaaccggatgcgccgagcactgctccctcaatgagaacattactgtaccggatacaaaggtcaatttctatgcatggaagagaatggaagtaggacagcaggccgtcgaagtgtggcaggggctcgcgcttttgtcggaggcggtgttgcggggtcaggccctcctcgtcaactcatcacagccgtgggagcccctccaacttcatgtcgataaagcggtgtcggggctccgcagcttgacgacgttgcttcgggctctgggcgcacaaaaggaggctatttcgccgcctgacgcggcctccgcggcacccctccgaacgatcaccgcggacacgtttaggaagctttttagagtgtacagcaatttcctccgcggaaagctgaaattgtatactggtgaagcgtgtaggacaggggatcgctgataagctgccttctgcggggcttgccttctggccatgcccttcttctctcccttgcacctgtacctcttggtctttgaataaagcctgagtaggaag

SEQ ID NO: 16106 - RNA, 1536 nt, synthetic construct
  misc_feature 1..1536: note = source = /note="Description of Artificial Sequence: Synthetic transcript sequence"
  source 1..1536: mol_type = other RNA
gggaaataagagagaaaagaagagtaagaagaaatataagagccaccaatgcagcgcgtcaacatgattatggccgaatcgccgggactcatcacaatctgcctcttgggttatctcttgtcggcagaatgtaccgtgttcttggatcacgaaaacgcgaacaaaattcttaatcgcccgaagcggtataactccgggaaacttgaggagtttgtgcagggcaatcttgaacgagagtgcatggaggagaaatgctcctttgaggaggcgagggaagtgtttgaaaacacagagcgaacaacggagttttggaagcaatacgtagatggggaccagtgtgagtcgaatccgtgcctcaatgggggatcatgtaaagatgacatcaatagctatgaatgctggtgcccgtttgggtttgaagggaagaactgtgagctggatgtgacgtgcaacatcaaaaacggacgctgtgagcagttttgtaagaactcggctgacaataaggtagtatgctcgtgcacagagggataccggctggcggagaaccaaaaatcgtgcgagcccgcagtcccgttcccttgtgggagggtgagcgtgtcacagactagcaagttgacgagagcggagactgtattccccgacgtggactacgtcaacagcaccgaagccgaaacaatcctcgataacatcacgcagagcactcagtccttcaatgactttacgagggtcgtaggtggtgaggacgcgaaacccggtcagttcccctggcaggtggtattgaacggaaaagtcgatgccttttgtggaggttccattgtcaacgagaagtggattgtcacagcggcacactgcgtagaaacaggagtgaaaatcacggtagtggcgggagagcataacattgaagagacagagcacacggaacaaaagcgaaatgtcatcagaatcattccacaccataactataacgcggcaatcaataagtacaatcacgacatcgcacttttggagcttgacgaacctttggtgcttaattcgtacgtcacccctatttgtattgccgacaaagagtatacaaacatcttcttgaaattcggctccgggtacgtatcgggctggggcagagtgttccataagggtagatccgcactggtgttgcaatacctcagggtgcccctcgtggatcgagccacttgtctgcggtccaccaaattcacaatctacaacaatatgttctgtgcgggattccatgaaggtgggagagatagctgccagggagactcagggggtccccacgtgacggaagtcgaggggacgtcatttctgacgggaattatctcatggggagaggaatgtgcgatgaaggggaaatatggcatctacactaaagtgtcacggtatgtcaattggatcaaggaaaagacgaaactcacgtgatcagccagcgctgccttctgcggggcttgccttctggccatgcccttcttctctcccttgcacctgtacctcttggtctttgaataaagcctgagtaggaag

SEQ ID NO: 16107 - DNA, 767 bp, synthetic construct
  misc_feature 1..767: note = source = /note="Description of Artificial Sequence: Synthetic transcript sequence"
  source 1..767: mol_type = other DNA
taatacgactcactatagggaaataagagagaaaagaagagtaagaagaaatataagagccaccatgggagtgcacgagtgtcccgcgtggttgtggttgctgctgtcgctcttgagcctcccactgggactgcctgtgctgggggcaccacccagattgatctgcgactcacgggtacttgagaggtaccttcttgaagccaaagaagccgaaaacatcacaaccggatgcgccgagcactgctccctcaatgagaacattactgtaccggatacaaaggtcaatttctatgcatggaagagaatggaagtaggacagcaggccgtcgaagtgtggcaggggctcgcgcttttgtcggaggcggtgttgcggggtcaggccctcctcgtcaactcatcacagccgtgggagcccctccaacttcatgtcgataaagcggtgtcggggctccgcagcttgacgacgttgcttcgggctctgggcgcacaaaaggaggctatttcgccgcctgacgcggcctccgcggcacccctccgaacgatcaccgcggacacgtttaggaagctttttagagtgtacagcaatttcctccgcggaaagctgaaattgtatactggtgaagcgtgtaggacaggggatcgctgataagctgccttctgcggggcttgccttctggccatgcccttcttctctcccttgcacctgtacctcttggtctttgaataaagcctgagtaggaaggcggccgctcgagcatgcatctaga

SEQ ID NO: 16108 - DNA, 750 bp, synthetic construct
  misc_feature 1..750: note = source = /note="Description of Artificial Sequence: Synthetic transcript sequence"
  source 1..750: mol_type = other DNA
taatacgactcactatagggaaataagagagaaaagaagagtaagaagaaatataagagccaccatgggagtgcacgagtgtcccgcgtggttgtggttgctgctgtcgctcttgagcctcccactgggactgcctgtgctgggggcaccacccagattgatctgcgactcacgggtacttgagaggtaccttcttgaagccaaagaagccgaaaacatcacaaccggatgcgccgagcactgctccctcaatgagaacattactgtaccggatacaaaggtcaatttctatgcatggaagagaatggaagtaggacagcaggccgtcgaagtgtggcaggggctcgcgcttttgtcggaggcggtgttgcggggtcaggccctcctcgtcaactcatcacagccgtgggagcccctccaacttcatgtcgataaagcggtgtcggggctccgcagcttgacgacgttgcttcgggctctgggcgcacaaaaggaggctatttcgccgcctgacgcggcctccgcggcacccctccgaacgatcaccgcggacacgtttaggaagctttttagagtgtacagcaatttcctccgcggaaagctgaaattgtatactggtgaagcgtgtaggacaggggatcgctgataagctgccttctgcggggcttgccttctggccatgcccttcttctctcccttgcacctgtacctcttggtctttgaataaagcctgagtaggaaggcggccgc

SEQ ID NO: 16109 - DNA, 1578 bp, synthetic construct
  misc_feature 1..1578: note = source = /note="Description of Artificial Sequence: Synthetic transcript sequence"
  source 1..1578: mol_type = other DNA
taatacgactcactatagggaaataagagagaaaagaagagtaagaagaaatataagagccaccaatgcagcgcgtcaacatgattatggccgaatcgccgggactcatcacaatctgcctcttgggttatctcttgtcggcagaatgtaccgtgttcttggatcacgaaaacgcgaacaaaattcttaatcgcccgaagcggtataactccgggaaacttgaggagtttgtgcagggcaatcttgaacgagagtgcatggaggagaaatgctcctttgaggaggcgagggaagtgtttgaaaacacagagcgaacaacggagttttggaagcaatacgtagatggggaccagtgtgagtcgaatccgtgcctcaatgggggatcatgtaaagatgacatcaatagctatgaatgctggtgcccgtttgggtttgaagggaagaactgtgagctggatgtgacgtgcaacatcaaaaacggacgctgtgagcagttttgtaagaactcggctgacaataaggtagtatgctcgtgcacagagggataccggctggcggagaaccaaaaatcgtgcgagcccgcagtcccgttcccttgtgggagggtgagcgtgtcacagactagcaagttgacgagagcggagactgtattccccgacgtggactacgtcaacagcaccgaagccgaaacaatcctcgataacatcacgcagagcactcagtccttcaatgactttacgagggtcgtaggtggtgaggacgcgaaacccggtcagttcccctggcaggtggtattgaacggaaaagtcgatgccttttgtggaggttccattgtcaacgagaagtggattgtcacagcggcacactgcgtagaaacaggagtgaaaatcacggtagtggcgggagagcataacattgaagagacagagcacacggaacaaaagcgaaatgtcatcagaatcattccacaccataactataacgcggcaatcaataagtacaatcacgacatcgcacttttggagcttgacgaacctttggtgcttaattcgtacgtcacccctatttgtattgccgacaaagagtatacaaacatcttcttgaaattcggctccgggtacgtatcgggctggggcagagtgttccataagggtagatccgcactggtgttgcaatacctcagggtgcccctcgtggatcgagccacttgtctgcggtccaccaaattcacaatctacaacaatatgttctgtgcgggattccatgaaggtgggagagatagctgccagggagactcagggggtccccacgtgacggaagtcgaggggacgtcatttctgacgggaattatctcatggggagaggaatgtgcgatgaaggggaaatatggcatctacactaaagtgtcacggtatgtcaattggatcaaggaaaagacgaaactcacgtgatcagccagcgctgccttctgcggggcttgccttctggccatgcccttcttctctcccttgcacctgtacctcttggtctttgaataaagcctgagtaggaaggcggccgctcgagcatgcatctaga

SEQ ID NO: 16110 - RNA, 851 nt, synthetic construct
  misc_feature 1..851: note = source = /note="Description of Artificial Sequence: Synthetic transcript sequence"
  source 1..851: mol_type = other RNA
gggaaataagagagaaaagaagagtaagaagaaatataagagccaccatggtgagcaagggcgaggaggataacatggccatcatcaaggagttcatgcgcttcaaggtgcacatggagggctccgtgaacggccacgagttcgagatcgagggcgagggcgagggccgcccctacgagggcacccagaccgccaagctgaaggtgaccaagggtggccccctgcccttcgcctgggacatcctgtcccctcagttcatgtacggctccaaggcctacgtgaagcaccccgccgacatccccgactacttgaagctgtccttccccgagggcttcaagtgggagcgcgtgatgaacttcgaggacggcggcgtggtgaccgtgacccaggactcctccctgcaggacggcgagttcatctacaaggtgaagctgcgcggcaccaacttcccctccgacggccccgtaatgcagaagaagaccatgggctgggaggcctcctccgagcggatgtaccccgaggacggcgccctgaagggcgagatcaagcagaggctgaagctgaaggacggcggccactacgacgctgaggtcaagaccacctacaaggccaagaagcccgtgcagctgcccggcgcctacaacgtcaacatcaagttggacatcacctcccacaacgaggactacaccatcgtggaacagtacgaacgcgccgagggccgccactccaccggcggcatggacgagctgtacaagtgagctgccttctgcggggcttgccttctggccatgcccttcttctctcccttgcacctgtacctcttggtctttgaataaagcctgagtaggaag

SEQ ID NO: 16111 - DNA, 1838 bp, synthetic construct
  misc_feature 1..1838: note = source = /note="Description of Artificial Sequence: Synthetic transcript sequence"
  source 1..1838: mol_type = other DNA
taatacgactcactatagggaaataagagagaaaagaagagtaagaagaaatataagagccaccatggaagatgcgaagaacatcaagaagggacctgccccgttttaccctttggaggacggtacagcaggagaacagctccacaaggcgatgaaacgctacgccctggtccccggaacgattgcgtttaccgatgcacatattgaggtagacatcacatacgcagaatacttcgaaatgtcggtgaggctggcggaagcgatgaagagatatggtcttaacactaatcaccgcatcgtggtgtgttcggagaactcattgcagtttttcatgccggtccttggagcacttttcatcggggtcgcagtcgcgccagcgaacgacatctacaatgagcgggaactcttgaatagcatgggaatctcccagccgacggtcgtgtttgtctccaaaaaggggctgcagaaaatcctcaacgtgcagaagaagctccccattattcaaaagatcatcattatggatagcaagacagattaccaagggttccagtcgatgtatacctttgtgacatcgcatttgccgccagggtttaacgagtatgacttcgtccccgagtcatttgacagagataaaaccatcgcgctgattatgaattcctcgggtagcaccggtttgccaaagggggtggcgttgccccaccgcactgcttgtgtgcggttctcgcacgctagggatcctatctttggtaatcagatcattcccgacacagcaatcctgtccgtggtaccttttcatcacggttttggcatgttcacgactctcggctatttgatttgcggtttcagggtcgtacttatgtatcggttcgaggaagaactgtttttgagatccttgcaagattacaagatccagtcggccctccttgtgccaacgcttttctcattctttgcgaaatcgacacttattgataagtatgacctttccaatctgcatgagattgcctcagggggagcgccgcttagcaaggaagtcggggaggcagtggccaagcgcttccaccttcccggaattcggcagggatacgggctcacggagacaacatccgcgatccttatcacgcccgagggtgacgataagccgggagccgtcggaaaagtggtccccttctttgaagccaaggtcgtagacctcgacacgggaaaaaccctcggagtgaaccagaggggcgagctctgcgtgagagggccgatgatcatgtcaggttacgtgaataaccctgaagcgacgaatgcgctgatcgacaaggatgggtggttgcattcgggagacattgcctattgggatgaggatgagcacttctttatcgtagatcgacttaagagcttgatcaaatacaaaggctatcaggtagcgcctgccgagctcgagtcaatcctgctccagcaccccaacattttcgacgccggagtggccgggttgcccgatgacgacgcgggtgagctgccagcggccgtggtagtcctcgaacatgggaaaacaatgaccgaaaaggagatcgtggactacgtagcatcacaagtgacgactgcgaagaaactgaggggaggggtagtctttgtggacgaggtcccgaaaggcttgactgggaagcttgacgctcgcaaaatccgggaaatcctgattaaggcaaagaaaggcgggaaaatcgctgtctgataagctgccttctgcggggcttgccttctggccatgcccttcttctctcccttgcacctgtacctcttggtctttgaataaagcctgagtaggaaggcggccgctcgagcatgcatctaga

SEQ ID NO: 16112 - RNA, 1796 nt, synthetic construct
  misc_feature 1..1796: note = source = /note="Description of Artificial Sequence: Synthetic transcript sequence"
  source 1..1796: mol_type = other RNA
gggaaataagagagaaaagaagagtaagaagaaatataagagccaccatggaagatgcgaagaacatcaagaagggacctgccccgttttaccctttggaggacggtacagcaggagaacagctccacaaggcgatgaaacgctacgccctggtccccggaacgattgcgtttaccgatgcacatattgaggtagacatcacatacgcagaatacttcgaaatgtcggtgaggctggcggaagcgatgaagagatatggtcttaacactaatcaccgcatcgtggtgtgttcggagaactcattgcagtttttcatgccggtccttggagcacttttcatcggggtcgcagtcgcgccagcgaacgacatctacaatgagcgggaactcttgaatagcatgggaatctcccagccgacggtcgtgtttgtctccaaaaaggggctgcagaaaatcctcaacgtgcagaagaagctccccattattcaaaagatcatcattatggatagcaagacagattaccaagggttccagtcgatgtatacctttgtgacatcgcatttgccgccagggtttaacgagtatgacttcgtccccgagtcatttgacagagataaaaccatcgcgctgattatgaattcctcgggtagcaccggtttgccaaagggggtggcgttgccccaccgcactgcttgtgtgcggttctcgcacgctagggatcctatctttggtaatcagatcattcccgacacagcaatcctgtccgtggtaccttttcatcacggttttggcatgttcacgactctcggctatttgatttgcggtttcagggtcgtacttatgtatcggttcgaggaagaactgtttttgagatccttgcaagattacaagatccagtcggccctccttgtgccaacgcttttctcattctttgcgaaatcgacacttattgataagtatgacctttccaatctgcatgagattgcctcagggggagcgccgcttagcaaggaagtcggggaggcagtggccaagcgcttccaccttcccggaattcggcagggatacgggctcacggagacaacatccgcgatccttatcacgcccgagggtgacgataagccgggagccgtcggaaaagtggtccccttctttgaagccaaggtcgtagacctcgacacgggaaaaaccctcggagtgaaccagaggggcgagctctgcgtgagagggccgatgatcatgtcaggttacgtgaataaccctgaagcgacgaatgcgctgatcgacaaggatgggtggttgcattcgggagacattgcctattgggatgaggatgagcacttctttatcgtagatcgacttaagagcttgatcaaatacaaaggctatcaggtagcgcctgccgagctcgagtcaatcctgctccagcaccccaacattttcgacgccggagtggccgggttgcccgatgacgacgcgggtgagctgccagcggccgtggtagtcctcgaacatgggaaaacaatgaccgaaaaggagatcgtggactacgtagcatcacaagtgacgactgcgaagaaactgaggggaggggtagtctttgtggacgaggtcccgaaaggcttgactgggaagcttgacgctcgcaaaatccgggaaatcctgattaaggcaaagaaaggcgggaaaatcgctgtctgataagctgccttctgcggggcttgccttctggccatgcccttcttctctcccttgcacctgtacctcttggtctttgaataaagcctgagtaggaag

SEQ ID NO: 16113 - DNA, 905 bp, synthetic construct
  misc_feature 1..905: note = source = /note="Description of Artificial Sequence: Synthetic transcript sequence"
  source 1..905: mol_type = other DNA
taatacgactcactatagggaaataagagagaaaagaagagtaagaagaaatataagagccaccatggtgtccaagggtgaggaattgtttaccggggtggtgcctattctcgtcgaacttgacggggatgtgaatggacacaagttttcggtatccggagaaggagagggtgacgccacatacggaaagcttacactcaaattcatctgtacgacggggaaactgcccgtaccctggcctacgctcgtaaccacgctgacttatggagtgcagtgctttagcagataccccgaccatatgaagcagcacgacttcttcaagtcggcgatgcccgaggggtacgtgcaagagaggaccattttcttcaaagacgatggcaattacaaaacacgcgcagaagtcaagtttgagggcgatactctggtcaatcggatcgaattgaagggaatcgatttcaaagaagatggaaacatccttggccataagctcgagtacaactataactcgcataatgtctatatcatggctgacaagcagaaaaacggtatcaaagtcaactttaagatccgacacaatattgaggacggttcggtgcagcttgcggaccactatcaacagaatacgccgattggggatggtccggtccttttgccggataaccattatctctcaacccagtcagccctgagcaaagatccaaacgagaagagggaccacatggtcttgctcgaattcgtgacagcggcagggatcactctgggaatggacgagttgtacaagtgataagctgccttctgcggggcttgccttctggccatgcccttcttctctcccttgcacctgtacctcttggtctttgaataaagcctgagtaggaaggcggccgctcgagcatgcatctaga

SEQ ID NO: 16114 - RNA, 863 nt, synthetic construct
  misc_feature 1..863: note = source = /note="Description of Artificial Sequence: Synthetic transcript sequence"
  source 1..863: mol_type = other RNA
gggaaataagagagaaaagaagagtaagaagaaatataagagccaccatggtgtccaagggtgaggaattgtttaccggggtggtgcctattctcgtcgaacttgacggggatgtgaatggacacaagttttcggtatccggagaaggagagggtgacgccacatacggaaagcttacactcaaattcatctgtacgacggggaaactgcccgtaccctggcctacgctcgtaaccacgctgacttatggagtgcagtgctttagcagataccccgaccatatgaagcagcacgacttcttcaagtcggcgatgcccgaggggtacgtgcaagagaggaccattttcttcaaagacgatggcaattacaaaacacgcgcagaagtcaagtttgagggcgatactctggtcaatcggatcgaattgaagggaatcgatttcaaagaagatggaaacatccttggccataagctcgagtacaactataactcgcataatgtctatatcatggctgacaagcagaaaaacggtatcaaagtcaactttaagatccgacacaatattgaggacggttcggtgcagcttgcggaccactatcaacagaatacgccgattggggatggtccggtccttttgccggataaccattatctctcaacccagtcagccctgagcaaagatccaaacgagaagagggaccacatggtcttgctcgaattcgtgacagcggcagggatcactctgggaatggacgagttgtacaagtgataagctgccttctgcggggcttgccttctggccatgcccttcttctctcccttgcacctgtacctcttggtctttgaataaagcctgagtaggaag

SEQ ID NO: 16115 - RNA, 716 nt, synthetic construct
  misc_feature 1..716: note = source = /note="Description of Artificial Sequence: Synthetic transcript sequence"
  source 1..716: mol_type = other RNA
gggaaataagagagaaaagaagagtaagaagaaatataagagccaccatgaactttctcttgtcatgggtgcactggagccttgcgctgctgctgtatcttcatcacgctaagtggagccaggccgcacccatggcggagggtggcggacagaatcaccacgaagtagtcaaattcatggacgtgtaccagaggtcgtattgccatccgattgaaactcttgtggatatctttcaagaataccccgatgaaatcgagtacattttcaaaccgtcgtgtgtccctctcatgaggtgcgggggatgctgcaatgatgaagggttggagtgtgtccccacggaggagtcgaatatcacaatgcaaatcatgcgcatcaaaccacatcagggtcagcatattggagagatgtcctttctccagcacaacaaatgtgagtgtagaccgaagaaggaccgagcccgacaggaaaacccatgcggaccgtgctccgagcggcgcaaacacttgttcgtacaagacccccagacatgcaagtgctcatgtaagaataccgattcgcggtgtaaggcgagacagctggaattgaacgagcgcacgtgtaggtgcgacaagcctagacggtgagctgccttctgcggggcttgccttctggccatgcccttcttctctcccttgcacctgtacctcttggtctttgaataaagcctgagtaggaag

SEQ ID NO: 16116 - RNA, 1316 nt, synthetic construct
  misc_feature 1..1316: note = source = /note="Description of Artificial Sequence: Synthetic transcript sequence"
  source 1..1316: mol_type = other RNA
gggaaataagagagaaaagaagagtaagaagaaatataagagccaccatgcccccatcgggattgagattgttgccccttctgcttccgctgctttggttgctcgtcctgacccctggcaggcccgcagcggggttgtcgacgtgtaagacgattgacatggagctcgtgaaacgcaagagaattgaagcaatcaggggtcaaattctgagcaaactcagactcgcatccccaccgtcccagggtgaggtcccaccgggacctctgcccgaggcggtcctggccttgtacaactcgacacgcgaccgagtcgcaggggagtcagcggaacccgagcccgaacccgaggccgactactacgccaaagaggtcactcgggtcttgatggtggaaactcacaacgaaatctacgacaagtttaagcagtcgacccattcgatctacatgttcttcaataccagcgagcttagagaagcggtccccgagccggtacttttgtccagagcggagctgcggttgctcaggctcaagctgaaagtggaacagcacgtagagctttatcagaagtacagcaacaattcatggcggtatctctcgaaccggctgttggcgccgtcggattcacccgaatggctcagctttgatgtcacgggggtggtgcgccagtggttgtccaggggcggagagatcgaaggatttcggctctcagcccactgttcgtgtgatagcagggacaacacgctccaagtagatatcaacggattcactactggtcgcagaggggatcttgcgacaatccacggtatgaatcgcccttttctcctgctgatggccacaccccttgaacgggcgcaacatcttcagtcatcccgccataggagagcactggacacgaactactgtttttcgtcgacagagaagaattgctgcgtgcggcagctttacatcgacttccgaaaagatctcgggtggaaatggattcatgaaccgaaggggtatcacgccaacttctgcctgggtccgtgtccttatatctggtcgttggatacacagtattcaaaggtgttggctctttacaatcagcacaacccgggagcctcggctgcgccttgttgcgtaccccaggcattggagccattgccgattgtgtattatgtgggaagaaagccgaaagtggagcagttgtcgaatatgatcgtacggagctgcaaatgctcctgataagctgccttctgcggggcttgccttctggccatgcccttcttctctcccttgcacctgtacctcttggtctttgaataaagcctgagtaggaag

SEQ ID NO: 16117 - RNA, 806 nt, synthetic construct
  misc_feature 1..806: note = source = /note="Description of Artificial Sequence: Synthetic transcript sequence"
  source 1..806: mol_type = other RNA
gggaaataagagagaaaagaagagtaagaagaaatataagagccaccatgggtgtaaggcacccgccctgctcccacagactcctggcggtgtgtgccttggtatcgcttgcgaccgccgcactgcttgtcaatccgggggtagtcgtgcgcatcagccagaagggactggattacgcctcgcagcagggtaccgcggcacttcagaaagagcttaagcggatcaagattccagactattcagatagctttaagatcaagcatttgggaaaaggtcactattcgttttactcgatggacattagagaattccagctcccttcgtcccaaatttccatggtcccgaatgtggggctgaaattcagcatttcgaacgcgaacatcaagatctcagggaaatggaaggcacagaagcgatttctcaaaatgtcaggaaactttgatctctccatcgaggggatgtcaatctcggcggacttgaaactcggctccaatcctacatcgggaaagcccactattacggcctcgtcgtgttcgagccatatcaactcggtgcacgtccatatctcaaagtccaaagtaggatggcttatccagctcttccacaaaaagattgagtcggctttgcgcaacaagatgaatagccaagtgtgcgagaaagtcacaaattccgtgtcatcagaattgcagccctacttccaaacgctgtaatgagctgccttctgcggggcttgccttctggccatgcccttcttctctcccttgcacctgtacctcttggtctttgaataaagcctgagtaggaag

SEQ ID NO: 16118 - RNA, 1573 nt, synthetic construct
  misc_feature 1..1573: note = source = /note="Description of Artificial Sequence: Synthetic transcript sequence"
  source 1..1573: mol_type = other RNA
gggaaataagagagaaaagaagagtaagaagaaatataagagccaccatggtatccaagggggaggaggacaacatggcgatcatcaaggagttcatgcgattcaaggtgcacatggaaggttcggtcaacggacacgaatttgaaatcgaaggagagggtgaaggaaggccctatgaagggacacagaccgcgaaactcaaggtcacgaaagggggaccacttcctttcgcctgggacattctttcgccccagtttatgtacgggtccaaagcatatgtgaagcatcccgccgatattcctgactatctgaaactcagctttcccgagggattcaagtgggagcgggtcatgaactttgaggacgggggtgtagtcaccgtaacccaagactcaagcctccaagacggcgagttcatctacaaggtcaaactgcgggggactaactttccgtcggatgggccggtgatgcagaagaaaacgatgggatgggaagcgtcatcggagaggatgtacccagaagatggtgcattgaagggggagatcaagcagagactgaagttgaaagatgggggacattatgatgccgaggtgaaaacgacatacaaagcgaaaaagccggtgcagcttcccggagcgtataatgtgaatatcaagttggatattacttcacacaatgaggactacacaattgtcgaacagtacgaacgcgctgagggtagacactcgacgggaggcatggacgagttgtacaaaggaagcggagctactaacttcagcctgctgaagcaggctggagacgtggaggagaaccctggacctatggtgtccaagggtgaggaattgtttaccggggtggtgcctattctcgtcgaacttgacggggatgtgaatggacacaagttttcggtatccggagaaggagagggtgacgccacatacggaaagcttacactcaaattcatctgtacgacggggaaactgcccgtaccctggcctacgctcgtaaccacgctgacttatggagtgcagtgctttagcagataccccgaccatatgaagcagcacgacttcttcaagtcggcgatgcccgaggggtacgtgcaagagaggaccattttcttcaaagacgatggcaattacaaaacacgcgcagaagtcaagtttgagggcgatactctggtcaatcggatcgaattgaagggaatcgatttcaaagaagatggaaacatccttggccataagctcgagtacaactataactcgcataatgtctatatcatggctgacaagcagaaaaacggtatcaaagtcaactttaagatccgacacaatattgaggacggttcggtgcagcttgcggaccactatcaacagaatacgccgattggggatggtccggtccttttgccggataaccattatctctcaacccagtcagccctgagcaaagatccaaacgagaagagggaccacatggtcttgctcgaattcgtgacagcggcagggatcactctgggaatggacgagttgtacaagtgataatggtctttgaataaagcctgagtaggaag

SEQ ID NO: 16119 - RNA, 1568 nt, synthetic construct
  misc_feature 1..1568: note = source = /note="Description of Artificial Sequence: Synthetic transcript sequence"
  source 1..1568: mol_type = other RNA
gggaaataagagagaaaagaagagtaagaagaaatataagagccaccatggccgtgatggcgccgcggaccctggtcctcctgctgtcgggcgccctcgccctgacgcagacctgggccgaggtgcagctggtcgagagcggcgggggcctcgtgcagccgggcgggtcgctgcggctgagctgcgccgcgagcgggttcaacatcaaggacacctacatccactgggtgcgccaggcccccggcaagggcctcgagtgggtcgcccggatctaccccacgaacgggtacacccgctacgccgacagcgtgaagggccggttcaccatcagcgcggacacctcgaagaacacggcctacctgcagatgaacagcctgcgcgccgaggacaccgccgtgtactactgcagccggtggggcggcgacgggttctacgccatggactactgggggcagggcaccctcgtcaccgtgagcagcgcgtcgacgaaggggcccagcgtgttcccgctggcccccagcagcaagagcaccagcggcgggaccgccgccctgggctgcctcgtcaaggactacttccccgagcccgtgaccgtgtcgtggaacagcggcgcgctgacgagcggggtccacaccttcccggccgtgctgcagagcagcggcctctactcgctgagcagcgtggtcaccgtgcccagcagcagcctggggacccagacgtacatctgcaacgtgaaccacaagccctcgaacaccaaggtcgacaagaaggtggagcccaagagctgcgacaagacccacacctgcccgccctgccccgcccccgagctcctgggcgggcccagcgtgttcctgttcccgcccaagcccaaggacacgctcatgatcagccgcacccccgaggtcacctgcgtggtggtcgacgtgagccacgaggaccccgaggtgaagttcaactggtacgtcgacggcgtggaggtgcacaacgccaagaccaagccgcgggaggagcagtacaactcgacgtaccgcgtcgtgagcgtgctgaccgtcctgcaccaggactggctcaacggcaaggagtacaagtgcaaggtgagcaacaaggccctgcccgcgcccatcgagaagaccatcagcaaggccaaggggcagccccgggagccgcaggtgtacaccctgccccccagccgcgacgagctcacgaagaaccaggtcagcctgacctgcctggtgaagggcttctacccctcggacatcgccgtggagtgggagagcaacgggcagccggagaacaactacaagaccaccccgcccgtcctcgacagcgacggcagcttcttcctgtacagcaagctgacggtggacaagtcgcggtggcagcagggcaacgtgttcagctgcagcgtcatgcacgaggccctccacaaccactacacccagaagagcctgagcctgagccccgggtgataataggctgccttctgcggggcttgccttctggccatgcccttcttctctcccttgcacctgtacctcttggtctttgaataaagcctgagtaggaag

SEQ ID NO: 16120 - RNA, 863 nt, synthetic construct
  misc_feature 1..863: note = source = /note="Description of Artificial Sequence: Synthetic transcript sequence"
  source 1..863: mol_type = other RNA
gggaaataagagagaaaagaagagtaagaagaaatataagagccaccatggccgtgatggcgccgcggaccctggtcctcctgctgtcgggcgccctcgccctgacgcagacctgggccgacatccagatgacccagagcccgtcgagcctgagcgccagcgtgggcgaccgggtcacgatcacctgccgcgcgagccaggacgtgaacaccgccgtggcctggtaccagcagaagcccgggaaggcccccaagctcctgatctactcggcgagcttcctgtacagcggcgtccccagccggttcagcgggtcgcgcagcggcaccgacttcacgctcaccatcagcagcctgcagccggaggacttcgccacctactactgccagcagcactacaccacgccccccaccttcgggcagggcaccaaggtggagatcaagcggaccgtggccgcccccagcgtcttcatcttcccgcccagcgacgagcagctgaagtcgggcacggccagcgtggtgtgcctcctgaacaacttctacccccgcgaggcgaaggtccagtggaaggtggacaacgccctgcagagcgggaacagccaggagagcgtgaccgagcaggactcgaaggacagcacctacagcctcagcagcaccctgacgctgagcaaggccgactacgagaagcacaaggtctacgcctgcgaggtgacccaccaggggctctcgagccccgtgaccaagagcttcaaccggggcgagtgctgataataggctgccttctgcggggcttgccttctggccatgcccttcttctctcccttgcacctgtacctcttggtctttgaataaagcctgagtaggaag
